United States Patent Application Publication US 2026/0265781 A1 - sequence listing, part 7

SEQ ID NO: 22 - DNA, 26290500 bp, synthetic construct (residues 13,145,251-15,336,125 of 26,290,500)
  source 1..26290500: mol_type = other DNA; note = Hot spot 1 - Chr 3 contig ref|NW_020822499.1 from Cricetulus griseus
tcaggacaatgtttaatgtttccagtaggttgtcctgtgaaaaagacagcaaccatttagatcttcagtccacaacttcattcatctcctaccacatgacagatactgtggtaggaatctgaaggcccagctctgtcttaagaaagtcaggaaaacttgacagacaattttaccagaggagatatggccaaatatggtgtttcagttatgcatataatttgcttgttttgctaaatgcaaatttagggcattaaaataactattgtatagaaatcaaatgtctagtaatccagctccctgtaaagttaattttattctttttttttgagacagggtcttcatgtgtttttggctgtcctggaacatgctctgtacaccaggttgtccccaaactcacagacatttgcctatctctgcatcctgagtgctgggattaaaggcatgtgccaccacctcccagctaagtttattctttaaagggaattttatctaaaatattttgaaacgacagcatggtggcttagatttgattatttccacttaaccagaaggcatgggggcttcttctagttgagatgtgcatttggaaacactgtgggtaaatacatgtgtttacttcggcaaagggataaatattactttctgaaagaatggaactcttttaaagacagaacttggcaaccttcacatttcttgtaatacagaaaactgactttggaaaaaacacatttgttaccataaactgttaggacacacacatatgcatacacacacacacacacactacacacacacacacacacacacacacacacacacacacacacatatataacacatacatacacacatgcacaatacacatatacacaacatacacaatacaaatatacaacacacaacatatacttacaaacatgcacaatacactcatggacccatagacacacaacacacacgcatacacacaatacactcatacacacatgcatatgacatatatacacaacacatgcatacacacatatacacaacatacacaatataaatatacaacacacaacatatacaaacatgcacaacacactcaaggacccatagacacacaacacacacgcacacacacacacacacactcacacacacacacacacatacacacacacatacacacactcacacacacacacatacacacacacatacacacacactcacacacacatacatacacacacacacacactcacacacacacacacacacacactcacacacacacacacacacacacacacacacacacacacagtttctacttctgtttctcagaatttatctcccttctaccagctacctcaattcctatcttcttattaagtctgttcatgaagatgcttctgggttaggtccactttggtatggattgaatttccaaagcacattttcatttcagcccccatgcagccacgcactgcaaatcaaataggcggggaggttcaggagccgatagggaactgagacaccttctgagtgctgatggatttccagtcacttgtaacaatgtctgataggttaaggagctgcatgtcatgagatcagggaagtggctttccacccattcttgccctttggagattattgtcatcctcatggtgctgtgaaccaccagactgaggaaatagaattgaaatgagcctcacggagctgtgtagcacaaatctcaaacctgtgaagcagggaggctttcccgacaggaagggctgtgttgttagcatgtttctcaaggagaagcaggtatgcactttacttttctgtgcacagaacaaagagtaattccttgtgattcttgcagtatgttacttttaaactctagtgagatatttttctctatggacactttgtggtcaatgtttttatagagtaataaatcaatccccccctcaggttcttccctggattattgattccaggggaaaccagcaattgttacatgcaagaaaagctttttaaatgatatgcagattctagatgtcaactaaattgtctgggtttcagtttttaagtgtgtgatgcttttatgaggctttatttgtgagaagggaaatagacatggagagtttcccacacttaacagtatgcctctgcaagaaagatcctgacggttccgcaaggctgtattatgttttttataactgctgctataatgaggaatatagtatattacatgataaagcatttcatttggcctaagcttttattttctttttacttctaatttaaagaggaataaaatcctgttttgtggctcatcaaaactaccttaggaccagtgagatgctgaggggttagaggtacctgtagtgtaaaccagataacccaagatccctagaagtcacagtggaaggagagaatggatcctgaaagtcctctgacttctacatgcatgacacggtgtgtgcatgttcccccctctccctctcacacacacacacttacacacacatacacacaccacactaataagaaagacaaaaaattgaaaaagtatggtggaccctgtacgttagttgccacgtgagatatgggccaagtgagttatggagaaatacacagaatggggtctttataggcacaatatggaacctcatgagccagcagtccttagatcaggagacacaggggcatttcctttctccatgttaaagtaaatgaaaacacaggaggctctttcacatatgcagtatggcaggaagtggaaggcagaaaatgtacacattacagccatccatcatgttctcttaagccaaaacactgttttctatgttgaatgatttccttgtaaatctaaacactggttagcaatgtagattcttgctcatttcttcatatgaattgaaacagctatttgtactcacttgtgcctttgaaagagttctgtagtttagattgatttcaccaacctgcattatatacggcactcccaggtcacaattctggtcgcctgtcctggtgaattgactgaccaagagcattgagacatgaacattattaatttaataaaagacaaggtaaagaatggtagataatgttcacatagatttgggaaagacactaaattattagtcatgttaagatatctccaatgactgagggttcactttaaaaataaagtaagaaaaaagtttacatgcaatgcagagatgttcaattacaggacaacaacattttggctctctagtagaagagtgttacacacacacacacacacacacacacacacacacacacacacacacacgagatacacagagagagacagagacagagagacagagacaaagacagagagatatggcttaaggtttagggaacttaactgctcttgcacagggcctggcttttgttcccaacaccttatgacaactcacaatgacctttgtaacaggcagttacaggggatctagtgctttcctctgacctcctcaggctccttcacacgtatgatgtacataaagtgtacacaaaatcgtgtgcacatgcaatttttaatttttaaatggctatcatctggttccagaacagaggtaaattgattccagacataataggtatatagctgaatatagtacaccatgcatacatatatggcatttcaacttggtaagaagtagttggattactgaacatgtggtaacagggcagctaattggccatttgtgacaaggctaggtggatctctctcttaacccttacaacaaaatatggtcaaggagcttcaaaaagaaaacaaaataagccagttatggtgacttaagtgtgtaatcttagcactatggaggcaaggcaagagggctgtgaggttgaggccactgaaggctatgcaacaacacctttgtaggtagtattcttgtgtcctggcaatcagccctgttctactagccagctcccaaataaccacacagagacttactatcataaatgcttgggcgatagcttatgcttgtcactaactagcccttacattttaaattagcccatatttcttatctaagatctaccacatggctaatggcttgtcacctcattttccacatgtcctgcttcctctgcttctgacttgacactcctctgactctgcccttcttcttcccagcattctctctgcccccccccaatcctgcctagctattggccaatctgctttatattaacaatgagaacaaaacattttcacagtgtacagaaggattattccatattatttccctctgtttgtctaaatgaaaaaggaaggttttaactttaatatagtaaaagtatatgcaacaaaacagttatcagataagaatcacagttacaatatccagttcatttgtatttggcaaaattagagaaaatactctattatttatcttatctttctgagtctacagttttatacctaatttaccttttttgtttttttggattttcgagacagggtttctctgtgtagctttggagcctatcctggcactcgctctgtaggccaggctggccttgaactcacagagatccgcctgcctctgcctcctgagtgctgggaactatggaaaactttaagtctaatttttactctttaatgccatcaaagaccccataagggtgaaaggttacctaatgacagggacatctggctgcctggacagttactctaggttcttcttctgcagacctggtatatatatctgacagatgtttctgagaagcaggaaattttgaagaactgttctactttgttttggcaaagtttggcagttggttgttttgttttcatcctgtttgtccagtttggacaggctactgtcagcaattgagacaagggcagtttctttttccaaatggctagcttttgccataaaagaaaacaaattccatacagagtttctttgatgtccatcatcttcatcttcttttgaagcaaattggtgttgtaggagcagatctttctcactgtcattaaagccttattttattagaacattttaaatgtcatattctgtaggtctctgaagtttttgaagactatctatctatctatctatctatctatctatctatctatctatctaaatgtatctgtttaaggtcttgaaagcatacctaacatgactgtaaatttgactattatagataactattaatctgtatttcttaattatacactatatctttaaatgaacagcatgaacataataacccaaacaagagtagaagcatacgtgaagtataacaaaattaactttaaatttgtatcaatgaaccaaaatccataccaatgtaaaatattttgaggttaatagttgtttttttttggattaaagttgattcaataatctactcttttatctcatcgtttctatatcatacccccctttttcctttagaaaaagatctttgaatcttttcaaatctttgtttagatttttttctgactatggccaataacaacttgtaaccaatgtaccttaaatgataacaaacatccataaaccatcttttgggaatgtggtgtcattctcactctttaaactatttcctattgtctgggggtgttggtatctttgggtgaacctgagaaaattcaggataatggttaagtcttggatggagtagtctgtggggctgaatcatctcagccagcagccttgaaactgttttggatgcagaattctgaggagactgtaatagaggcattctaagatgctggatcacctggatcatcccttttctttggtgtttggtctccttgttctgaaaatacataaacttttaaaggtaacatatattataagtatggaatatatggtgtgcacaaatcaatttaaataatttttgttttatgtttgagcaggtcaaatatatgttacatgtcttgcagtatttttaaaggtttatttctttatgtttgtagccaggattttcagggggtcttccttgatcaaacctgatccatatcaatctagaaagagtctacagcctctcagttcctgtgacaataaaagcataacctctcctccaatgcaacacattttttacttccattttgaagtcaagacattttaaaagtagatatgttgggttaatctagcagtttccataatccaatgtctcttagcagttattggtcacttattaccagtcaaaaaatttaaagaccacacaataacaaacaggatccagactctgtatttcccttatgtacatgacttttttcttttatattactttactccctttttaaagaactttaaaactacatacatttatgactgtctatatctttttcttttctctcccaagtctttgcacatttttaaacacactgtaacacatttagagtttttatctgtctaaatccgtctttactgagaatcaataaccttttctgtctttatcagcacaactccaaacccaccatgcagtgtactggtagggctcatattggcagccgaagcccataggcagcttctgagagacacctctctgtacctcagcccatgttagagactgcagtaacccaccatgtggcttagctcacagcatgctggcagctcccagggcatgcatctctgtactgcagcagcaccagagacatgagactaggaagctgaatttggctctgttttgtgtgtttagaaccccttttaagctttctcagagattatgtggatgtaggtgcactacattgaaatgccatctgtaattggatttttctttcctgtcagttcccaaataaccacatggaaacttcttattaaatatacatgcttgtctgatagctcaggcttattactaactagctcttacaacttaaattaacccatatttcttatctaagttctattacgtggttcatagcttgtcacttcattttctacatgttctgtttcctctgcctctggctcgacactcctgtgactctgcccttcttcccagcattctctctgcccccaaaatcctgcctaactattggccgatcatctttttattaatgataagaacaacacattttcacagtgtacagaaggattattccacagcacaccttgtttccaaaatcaaacacaaagtaaaataactaaatcattgactttttttttaaaaaagggtgattattatttataatcttgaaatgaaaaaagtattttttcacatgacataaattcagctttagaaaatattttaactaccttaaagaacttttccatcaaaatgaaaaaaagtcaaaagatcttagaagatcatgcacattcaacataacaaagggctacattccttccttccataaaaagagcagctaatgagataagcaaataggaagatagataccagagtagtatggccaattcctagaagaaaggcaatcagccaggaggctgaagaaaagatcccattcaaccttttcaatgacaaaataccaaagaaatgatacagtattgtgttttacgttggtccaaacaaaatgaaacttgataacccctcacattgctgaggatataaggatccaggtggaggatctcattatggaatagttgtctttataaacaacacataagcctgctcagtaacaccccaattgcatccccagggaggaggcaaagtcaggtaacagcagtatgcattttgaaaaaattcagacattttaggtttgttacacaagtattcaagggcacaagcaaaatattccatatagtattgatgacaatgaggagttggtaacacaaatggctagcaatagaaatttggttaaacaaactataatataccaaacaggaatactataaataattaacacagatgtattcttacaatgaaaatagattacaatatactgttaaaaactcaagtagaaaaactggatgtctaaattaattccatcatcatcgtcatcaccaccaccaccatcgtgtgtgtgtgtgtgtgtgtgtgtgtgtgtatccttatttgcattggaagataagcccttttcccactgagctatttccccagacttgatcccattgctatttttaaaatattatgcatgcaaaaattggagtcatatatcagctaatatggtagtcactttcttcactatatagttgtagcactcaaaatttttataataattattaattattcttacatggagacagtcattaaaaaacaaaactaaaaattaccatgaagaaattgtagtgaatcatgtatttctttaaagactggctttcttcctcaactaaagactgggtttcttcttgagtcaaataatattccattgtgtaaaacaacacattttcattatacattcattaattgatagacatgcaggctgttttcatttccatgctattgtgaatagagcagcaatgaacatggatgagccagtatatcagtagtagggtatatgcccaagagtggcttcattggatcatatggtagatctttctctagcttttctaggaaccttcatatagattttgacagtggctgcaccagtttgcaattccaccaacaattaattaatgttctatccccacatccatgccaacgtttgtcttttttacaaattcttagccattctgactgaagtagggtaaaatctaaagtagctttagtttgtggattcctgatgcctaacaaagctggatattttaaaggcattttattttcttggccatttgaatttcttcttttgagaactctgtttaattacacgatcccattattaactaaattatttcttttcctattccttttatctttgtatattctagacatcatctctttttcatatgtacagctggtagaaaagtttattccattctgtaagttgcctcttcactcaaatgatggagatctttgctgtacaggagatttttggtttcatgaggcctcttttgtccatcattggttttagtgcctgtcttactggggtcctattcagaaaattctcccctgtccatataatttgaagaatatcctactctctgttttgtcagatttagacaaccaggtcttacattgaggtccttgattcttacatagttgttttgtccagggttagagataaagatctagtctcactagatgtagacatccagtttgaccagcataattcattgaagacaaattatgccttttttccaatgttcatttttggcttctttgtcaaaaaagaaaaactggtgactgtaggtgtgtgggcttatacctgagtcctctattctattccattgtttgatgtgtatgttaggaccaagctgtttttattactatagctctgtaatataacttgaaattgggaatagttttaagtttggcagtgctttcattattcagggttgtgtaacatgaaaaataaaagagccagagactgatattggggttcaaacttctagctgatgatcagaaaagcaaagcagctgccactagcttcatacctctacctcaggctgaaggggctgacccaccagctctcctcagcatgactggagactgaatgctcctattttcaatgttgctggagaatgaatgcctcctactgaatactgacaatgcttctatcttttattcccctctagtgcagggattaaaggcatgtgatctgttattgttttagactgattccatctcatgtatccctgagcaggcttgaactcatagagatctatctcgtaaccctgagtccttggattaaagatgtgtaacaccaaccacctcctagcttctagatgttggactaaaggtgtgtgtctgacttctatagtttgtggctgactttgctttctgaatccttaggcaagctttaataagtcataaataatgtatcactacagggttgttttggatgtcctggttctttgtgtttccatatgaattttgagattattttttcagtttctgtgaagaattatgttggaattttgatggaaattgcatggaatctgtaggttgcttgtggtagaatagctgttttcacattatcaatcctatctatgattgtgggaggtctttccatgttctggtgtcttcctcaatttctgtagtgtactacagttttcattatgcaagcttttcaattccttagttctatttatcccaagatatatttttttgaggttattgtgaatatgaccctttctctgatttttttctagatatgtttatgttggtgtataggaaaactactgagttttgtgtattttgtatcttgatactttgctgaatgtatttgtagaatcatatttcttggatatactttgacttcttactttcctatttgtatttccatttatggcttcttttgtcttactgctctaagactccaagcacaatattgaataggagtgagtgggtgtccttaccttgtttctgattcagtttcttgtatattgcctatgttatgttgagatatgtcccctgtatctctagagtctccagagcttttatcatgaagggatgtttgttgtgtgataattcttttgtatgctgtgaatatgatttacactcattggttaataacaaagctgatttggcctatagcaacgctgaataaggctaagcgggaaagccaaactaaaaataaggagaggaagggtggagttgggagatgtgagccagttgccaaagggacaagatgtgctagaggacaggtaaagccatgagccatgtgacaaaatgtagattaatagaaatgggttaatttaagttgtaagagctaattagtaataagcctgagctacaggctgaacattatataattaatataagcttattgtgattatctgggaccaggtagtcaggactgaaaagctccacctccatttacagatgttggactcaaaaacctttccccggtctagtgagaatgaccatgtggttaatgtggtggattatgcttattgatttattgatttttatatgctaaaccaaccatacatgtctgaaatgaagctgacttgattctggtggattatcttttggatttgttcctgaattcactttgcagtattcattgagatttttgtgtgtctattttcatcagggaaattggtttataactctttttttgtagtgtctttatctggttttagtattgaggctttattgaaaaaaaattggaagcatttcttcctttcccttttcacagaattgttttgggagtattggtgttagctcttgaaggtctgatgggactttgtgctgtatctatcagaccctagggttttttttttttttaaattagttttgagattattttcattagtgcttggttattatgatttacatcattttagttaaactttggtaatatatttctaaaagttcatccgtctcatctagatttaacggtattagaatacaaattttaaagcatgtccttagggttctctaaattttctgtctgttgtaatgtctcatttttcatctataatttaatttacttgggtcttctctttcttttggttagtttagctgaacttttgtcggtcttgctaatctttttatagaaccaactctccatttcacagattccttgcattgtttctttcatttctgtccattgacttcagttctgatgatgattgtctattcctgtctcctgtttggggtggtggtggtttagttttgtttttccaaggtcttcaggcacatcattaagtcattaaatttgagatctttccaagtttttaggcaggcacttcgcgttataatctcccttcttgggactgctgtcattgtgtcccacagatttgagtatgttggactttaccattcaattctaggaattttaaatttttctttttcttccttaactcaattatcattcagttatttgttgtttagtctcaatgagtttgtgtactttattttttaattgatatctgtggtctgagagaattaagaatgttacttctgtttcttagatttgttgaaacttggtttatgttttaacaatagctacaacaaaattctgttttctaatctaatctagtctgctctcctgtatctttttatgaatatccattactatttatggttatattgaagatgttttcagtgcacacacaggaaacaaaccccagccagaaacctctgtgttcatcttgttctggtcttgatcagggttccactagcttcaggaatttttaattttatttctaattacactcctgtgtgtaaggctataggccatgtgcacttgagtgcatggactctgtggggctggagttacaggtggctgtgattgccctaccctgggaatcaagctcactgagttctcagccatcaacccacctttccagccccccatttctccttgccctcttcttaaatgtcagcatctattttaaggctttacatgaatagaattgtgtatacatgtgtgcaagtatgtatttacctatagtccttaactttttaaaaataattctacattatcaatttcattatctttgaccacattgataatttcaatgttgctgttcaattatttttttgtataatcctttttcttatgccactttgaaaactttttccatcagtgttgtggtttaagtaggatttcctacttactttaaaaaaacaactcacctaccccaattattttagtcttgttcaccaagttagttctataatgagtggaaataaaatttttaaatttgttttaaaaattagggtcttactttatatgcagctttataatttactccaaaaattaaattgtgagatactttccatgcaactatgcattcttatatttttgtgggtttatagaacgagagcaatttactcaacctgatgttggtttttgtgatatcctactctggtaagtgccatacagaatgcttttattcccccccccccacatggcatcactgaattaatgagggcttttatcaaataaggataaaaatcagatgtcttcagagaactggagattactctaagggacctaagtagatggtgaaattataaaatttacttgaaaataaaacatatgggtgattgatgttttaccaaccccttttatttaatggccctctaatattctttcaaaattgtgtctgttgagatcactagcaacttaacaaaacaccaaaacatgacagacagcctgtgagcttctgagacaggaggtagatctttcagtatgtgtaattactctaagaggaataggatatcatgaaagccttttgtgattctgggtatttttatactaaacatgtagattctatcctggaagctaatatcactcaagaatctttctgtggaggaacacatgctgatcatgccttcttctaaagcttagaagaggggcaagtagccactcaattctgctatccttaaacacaatacacgatatagggtgtctctcatgcaagaacacttgcttaaagctaatgaccaagcttggccatttgggaaggggcgcctaggggaaaggtgctatgccacttatgtctttttaaacaagcacttgtttttctttttaaaatagcacagagccaaaagtaaactctgaaattacagcatgaggaaaatggtgtctgctaagtgcaggccaatggcaaaggacccacatattaacttagctgtccagtgtgccagccaaatctgttactagagctaatcttgcatttggagaatcatgctgttaaacagtatgagattccagagaaacacctttataataccaactttgttgtattcacacagtctattagtctacattgactcccttttaataagttacttccctgtcatattagttacaacaaacaccttgaatttttaagtaatttatatctctttggaatgatggggggggggacctaaaaccaaaaacctctacagcctgtttcctatataaaatttgcatagacaattaatagtatatccttattaacataacctttgctgttaacaaagcccttctccacaaaatacccttctaaaatatttaaaatctgagtaaaaatatttacttgatgttgtgaatgtatgtttctcttattggttgatgaataaagctgtttttggccaatggacaggcaggatgtagccaggcaggaagtataggtggggctaccagactaagagaatgcagaaagtgagtcttgggagaaacactgtgtagctactgataggatgcctgggcattttccagtaagccaagaccacgtggaaatatagattaatagaaatgggttaataattaagagagagctagccaataagaagtccgagccattggccaaacagttcataattaatataagtctctgtgtgtttatttgggactaaatagccgtgggactggaacagaaacttctgggtacatctataggattcttcatcaagtgtaagtaatttctggcttacagcatccagagacaagacagggtgtaacactagtaatatgtcactttataccttccttcatttgaatacataaaatatatatggatataataactttcctatgtcaatctatcactgttaatatattttaaagtcaactatgcaatttctctaagtttaattttttttaatgttctattctttgtatgtattagataatcagttactagtttcatttagaccatacttcacccacctaacactatcaaagcagttcaactggacgtcttggctgatggatgctgtgaagtttaccaaacatggagataaatcacacgtagcacttgttttaggagaggtaaagtttacttagacatcagcaaagacaacaccatttccatagtctacagaaatacaataatatacagctggtttggtacatggctccatgttaaaaaacaaatctaatgggaaaggaaatggttcatcttatttctctgccatttatcataatttaataggtacatcattatgttctggaagatggctgcatagattagaatcctagggctgctggttaatatacatcattatataacaagaataatagaaaacaaataggtacagatatacagtaagcatgcaaattaggctattattttgaggaaacaggatagactttagtgaaaactgaaaactctgttgttattgcaccatcagtactgtataacagtacatatggtattttacatggcacaggatttcctcctcttcaaataatgcttggcaaactggatcaggtcaatccaatttctagagcaaatttaaattaaaatgaaggaaaactctattagatatctttctaaataatctaaataatccataaagtactgaaatttcatgtctacttgtcacctccaaatttaaacaggttcacactttgtaccctgtaaatctgcgctcctgaggcagcagcacctagccacacgtggcgcctgaggacaggacacacggccagagtggagggacagtgagtgagtgcagaccactctcaactctgaagactaagataaagagaaaaaaaggagacaggtagcgccttaattgtgttatgttgattacatgttgaaatagtattttaatagattaagttaaataagatatattattaaagttaattacacttcttaaacattgctactagaaaattataattctttttcggctcacactacatttccattgaataccacagccataaacaatacatgattatgttactcttagaatttacatttaatcttagccaaaagtccaagtgataaccttagaatttagcataatttaatcagtccgggatactaaatcccaaaatatcacaagtgtactttgcacatacctttttacaaaaatttattcttattcccttccaggatacacattgtaactgtaaagaattcacaagagatttaatccttttaaaactgtggattgctatacgtagagctaaaggaacttcaatacagactgttacagcaggtaagtactatcagtgaagacagagtctccaggaaagctagctagcctaactaatacttaatgcccgggatatgatggtgcaccatgaaacatggtaacgcgtctgatgttaactgcagcctactgaacactctttttggaaaatctactagcgatgcaaacttaacacagatggcaacttctaatagcagagtatagtatctgagatctttctcttcagtgaaagctcctcagttttatagtgttaaaataaaccattaactagcatacaaaaccccgagttcagaaatagtccttctctttgtttttgtaacagtatataaatatttgggggtacttataacacctcatcttttatttgtttccagctcacaaacagtaatgtgatctagtctagtgtacactccattactctcctagaacaaaatacaccaaaaatagagctgactacagccagtgacacgatcatgcatcagcaggctcactggaaggcaaagccatttatacttgcactacacacacgcttcctcacagttcaggtaggaatgtatatttcaaaactgttcaaatctcagaaaaggtactcagactacaatatcattgataaatttttttcatcctcacgtcaaacatattctgagaaaattatatgaagtcaccgagcccaacttcctattttatcatcatcacttttacggcaccagagagcaactgagaattggggtgaaatcaagagtctctgccagaaagtgctggatattctaatacacatgcgggctacccaagacggccgcagctcttttaagcattcagctgccaatatttaaagacatttattaactgtgtcttgcataacaagctattgcttaaatttttcataactcctatcttcataccatggttctattaaacaatatttttattacgtttctaactgctgcctaaacaaacaagtgtaataattcatgtcatgtaataacattttcagtgtccaacacaacactctacaaatatagtcttcagtgaagagatggcaatggtctccttggtgagagctgttagtttgatgttaaagcaatagctgactaagtacttcatatctgcactccacctataccacttcctaaaccaacaaaaagctgactgctccagataccagacactggatgcaggaagaaatgaataattccaggggagtgacctgtgagttgacattagtatacttccccatggcacataaaaaaaaaaaaaaaaaaaacctcatatgtattatctatcactttataaacatgaacagatattgttgtatgctacacagtgctttgaggaaggtgaaatgaaggctgattgcttaaagagatggaagaaagcagaataacatggtttataaatcaccaaacccctaataaacagttcttacaaatatttaataaggcaagtggacatttaggtcagtttccaactttgctggaggaagctgtcagtcaagaaaatcactttaaataagaaaactttgagaaaatataaaactaaaaattcagggataaaatcttttgtagaaaaagaaaaaatcatgtatgtcgatctttttagatgtatgtgaacacacatacattcagatacctaaaaagaatctcaactctgcttgcgatattacatggtcttgccttgtatatttaaacttgagaatgtatttttcttacattattcttttttttaatgtgcattgatggcttgcctgcatgtatgtctgtgtgtcagatcccctggaactagggttacagacagttgtaagctgccatgtgggtgcagggaattgaacccagatcctctggaagagccaccagtgctcttaacctctgagtcatctctccagccccagaatgtatttttcatacaaaatagtataatacacccaaaactaagaatgtggacaacaatgagagagatatgttaatatccttctccagtatctatcagttctgacttgttttccacagcatgcaaggcattatgtgatttctgaacttgtctgggtcttgcatcttacacttgcagagaaaaaagaagccttacgaggcaaaacagctgtcaatttgcaaaacaacagtaattatttacctcactatgatttttaaaggctgagaatgtcaactgaaacagaatataattttctccacttccccaaaataaaactataacacagaaatcctcttcatgggcgacatttataacattcacaacacaactacaggacaagcagcaagatagtatgtattagattttgcatatttatgttcaatagctagcaatgtacttggcatactttgctttttctttttggcaacaatataaaattttgttctaaattgatgaaatcttctacaccctgaggaacaacaacggactaataaatgtcagggttagctttctggctcatgctgttgttcaggaagcacaaaccacatatatagttaataccctttcaagcacactgtttcaccagcagatcaattgaactgctctgtatttgtaagtgaacagtctctggttgttctgtggtaacagggatggtctgagagggtaaaaaagttaaagttgagagcctgagaattcccctcccacccaaaatccatacaagatacattggttactgcatcaattatgaatacaacataattagagatatattattcaagaattctctgtaacgtactttggaatttttactataaagaaaaattacttgctattattaaatatgatggccctcccctccccttccatatagaaatacataaaatttgaaatttcattttagtatttaccacttttcttttggtattagcaagacctacttttccccttgtaactatcctaccccatggctgaatttgggtgggagggaagtcttctgaataaggcaaagggtcacttgggacaaccacctgttctgtaaggtgcgctgggtgtctgctctcctttgaggacaggctgcacagcttttgtgtgtctttaattgtgcacacactgccttgtaattatgatgcctccaaaacactaaacattagttgtcaaaaggaaaggacaaatccaagtcttggtattcttggtagggcactcaaaaattgccaattatccaagtcttggtattcttggtagggcactcaaaaattgccaattaatgaaatagaaatcacaagatcctgtttgagtcagtatctcattgcatcatagtgagctgtctgacaaagtttctttcctgtttactagctaaacacaagagttcagtataagataatcttgtacctcacatcgaagtaagaaaggcactcaagttaacatagtatagttattttagataagacactgtgtgacagacactatgtggaattcttgggaggcttttccttgctcactgtttctataagactgagtttgttgaagttgtctggtactccacatgcttcaatagacaggtgctcactacagaccacgtgtgtcgggggtggggagcacacatagtgctagagcttgcagttttattggagacaaaagatatggtttacacaatggtcaaaacttttagaataaagcatttaaaaaatttaaagtacattttttctaatagcaaaataaaagtaaacccaagaagctttttggaaaaaaagagaataattcattttactgctgaattgtccctaatttagggagccaactgagatgcctatatggtggtggctccatgcctaagttacatttggcccatgtcagacaccacctgagctgtgtaagagaaaactgcaagactgacaatttgtagcaagttctacacacacacagccagcatgaactgagactatctgaacattagctaaatgacaatgtctactacacacacaagctttctgcagactgctgcatataaactcaaaagcttgcttctacattgcatgttacatagcccttatttgaaacactaagtggcttttggtgataatctgtacacatttaattctatgactgacttaatctgagtctgattctcagcaccagcaaaaacaaagggagaagaattaatgaagcatttagcttaagttagaactgtgccactagattaagaaatgtctgggcccagagcttctatagaagtaacaggggagagtaataggtataaaatccttaggcttaaaagaaaatctctcacacaggttcaaggaatacctaaaaggtccacagttcaagttgggaattgggatgactcatgaacaaatacagatcaacaagtctctaaatctaagcatcacctcagctgctcaaatgtatgcaagatttgctcttcaacatcatctagtgaaaggaaacaatattcttatcaagtggatcttattgactctgagaggttttagtgcagacaaacgaacagctaagagaattctggagctccatctcacggctgagagttaacaagtctaaacaaggtaatgaagacactaaatctaaatctcacttaaatattaaggaagctagcccacatcactcacttataactcattaacttcttgatcattactctatcataatgatgaatctttcccatcttcaaagagtgaattagctaacttaataaatagttattaagtccttataatgtgcaaggcatatgatatatcctggaaatacaattaccaaaacacacagattttagggcgaagttatggtaaaagccacagatcttaccacttttgtgagtcagtagtttagcacccaatgggatgctataatggcctactagtttcccagtaaagatcaaatgcaaagtgccagtctaaactatcttttcttttttaaaacaacataggtacagaagactatgactaaataagcccctcagttacatatatattctttctactgcattatttcatttggtcaaagacacagtagcttgctagagagggtaaatgccaaacacttagggaaaacaaacaggggaaatcctaagtcctgtgaatgaactcttgaaaatgcttatttcagaaataacgtagcatacaaaagccacacacaaaaaggatcttttagatatctgcatttttcctacttacttgctactttactaggaagaaaccatggtatatggactccatggcttcaggaaaaggtgggctgagccttagaagacataagaaggccgctaacaccaaagatgaccaagatgctgagcaggagatataaaaaggcatagaacactataaaattttatctgatgttcgtacagcatatcctatgcgcgtgtcctgacatactacatcaaatataagccctattacttgaggaactaaaagggatgctgggaaaacaggtaatagtgagtgaagacaggatttggcagcagaaactgctgtttcatttctacttaatctcagaggcgctaaacataatgtaacggttttcctatagagatccaggtagaacttgaggtattcgatgattcaaaatgctctgtatatagaaggctatggaattatgttcacaatgttgagtgttttattatctaaatacaataaaacagtacaaataatttggctccaagagagaaagatctaagtactggggccagtagaaactttttctagttctctaagtgtttcactcagcttagcagtctgccacccaacaagaccatgatgccctagttaaattttattattttttctcttaatgaagtgtgccaaactcaagtgcaagtttttaatagagtcagactggagtggtttgcttttccttcctccctctacctacactatagatgaccaagtatgaaaaaggagaacatgcaaaacacgacggcggtgcttatttctgtaatcaatgcttacattttgtacatatacaggaaaagaaacagcttccaccattgtgctggcttagttttatgtcaatttgacacaagatagagtcatctgaggagagagcctcaattgagaaaatgtctccataagactgggctgtaaacaaccctacaggggatttttttaaattagtgattgatgggagagggtccagatcagtgtgaatggtgccattccatgggctggcggtcctgggtgctataagaaagccaaataagcaagccatggagagcaagtcagtaagcagcactcctccatggcctctgcatcagctcccacctataggttcctgtcctgcttgagttattgccctgaattctttcagggatgtactatttgctacctggaagtacaggtgaactcttccctctcctagtcgcttttattcatagtgtttcaacatagcaacagaaaccctaaccaagacaaccattaaaagggaacaggagaagggcacctcttactcatacttcctgtgtttatatatataggtattaaattcactgacataagatagataatgggttttgtgggcctcccagtgcggggagaagtgggtagacacacaagaaaaagacatggaccactgagtgatgaaaagtacggaatggactggtaagatatcgagaagggaagcacacagagaaatcacagctcatccgaaggggtggatgcagtaagagaaacagagacggtactcaacccattcccaccccgcttcaccatcctggaaaacagcccttgtcattgagatatagctataatgtggactttggtacttatccctgatgaatttagtatcaaagtgttttgtttgattttaaaagtaaaaattgaactaatgctgaaaactagtcttcctccctggattttgccagtaaattctgactagccacttgacacaaaaactttgcagtttatctagtataagctcagtaacttaaattttttttttttttaaaaaaagcttcataggactacatttctatgtatatttctcccactttttatgagtgattttagaatgaaaacagtagtaataactaaaaatggcatttctgggttttttaaaaaagaatttattttataagggctgacttactgttttggcatataccaaatatgaggtaaaaataatctatcaaaactagtaataaaaataattttccagtactacaattacataaactcttaaattagtttagtttcttttaaatcatcatttaaaaaatagattacattggaagcattttttttttttttctatataaattctaacactcctggctttggttctcttagtcagtaactggagaacaagcttgagaaagaagtggcttacattttcacatatccatctatctagccattttaatcttaaaattgcaattaggtcaagaccttctgcacatgtattaatattcttaagctgaactgcaacttaaaatttcaatctttaaagaaaccgtttatgtagcaactgaactgaggtgagtaaaggtgtgtgaaccaatctcaagaaccaaatgagaagacaaatatggaaatataaagggcatggaatcaaacaggaaaaaaaaattaagactaactgcttagcaagaaggaactgtacaattattttgtacccaaaggaatgccggctcataacaaaataaataaaatgaaaggtttcttaagctatagatgaagaatacatagttagccagtcagttcatgcaactatggcattgagaaaggaaagcaatattgcactaaaaggggaatttcttaggatgaatccacccctcttactgactcaaagtcaccagccatttcctgtatgcattggcatacctggcttgctctacattccgacaagtggatagcacttgatcaataaacctgtgctccatctctaggcctacagggtctggaggtggggtccgcttcaagcgcttggtttcctgggaatagccttgtttgctggagtcattcagtccatccacttccattgcctgagacagttgggggcttgctggaatcaggtgcaagtcattcaaagtgccgccagagcagtctgcaggtgacaggtgcgtcacgttgggaggacacttgccatttaagtgatgttgaaggtagaaagcatgccgcctgtgacggggaggggtggaagacataacatcagcacaaaagtcaacatttccaggcaaaagaagctgataatttaaaaatacacagtattagctcatacccagttcataacccagagctgtctcggggaagaagaaaagtaacttgaaagctcagggtttcaactcttactactggttgtgagaaaacagtagagctctaaagacttttcagtaaagatttactcagatcacagtgagtttgttctaattctaacatgaattacaaacagtcaaagctcagtattctccataaataattatataaaagaaaataccaccttcatttagaatcttagaagtaattcagaaacaaggtacactaaacagttcctccagactagaagcatagctcatagtctctatctagtcttctgaagacacttttattgcatctgtgtgtgtgtgtgtgtgtgtgtgtgtgtgtgtgtgtgtgtgtgtgtgtgtgttatgtacgggtacagaagtcaattctctctttccaccaagttctatgctccaagtttggggatggaattcatgccatcaggctagttggcaaatgcctttactcactgagccatcccaccagtccctagtcttttaaaatctgaagagcacacctgtggcagttggtcttatttacgctttctcctaaacctccactgtagtcttccatatcagtgttccacagaggtatgttaggctctgagcaaagcacataaaaaaatgccactcctgttttcaacctaatagcagctatcacctagaattgcttattaaaatgaaaactgctctgcataatccccaaacagttttcatggtgcacacatctgctacacaaactgtgacatatgaggttctaagttgtaatatgtcattgctcattcaagtgctaaggccttaacatcaatgttttaagtctcctccttgctactgtgataaggaggtcaaaagagcaacaaagtcactaacacaacagccgcatgttctgtctttcttaagaaggccttgctgtgaagagaaaacatcactgtctactcatgaaggttctaaaaaaggaaagataatgtctgccttcttcctgagtatacttagtgtggattacagctaacaggccagctaagcagtccatgagaatgactagactggagagaggggtggggactcggtaactcaggaaatagagattttaaaggcattatccttgcctagcacagacaagtcttttgtttatagactgaatcctgtggcctgaagtagaattcggacttataaagatggagatacttccaaatatataaatatccaaaataaatgaagcaaagtgtaaacttacctggactttatttcagcatgaagcttataatattaaatgcactcaaaacccaggttaataaaattgatggccatggaggagcagaaatattcagttgggggaagaatagaggagagagagcaggatgagagataccatattagagggagccactataggtccgagaagagatccggaactagggagatctccagagacctacaaggatgacacgatctgacaatccaggcaatggtggagaggataacctaaaagcccttcccctaaaatgagattgatgactactctttatgccatcctagagccctcatccagtggctgatggaagcagagacagacatccacagatatacactgagctgaaatctggaatttagttgaagagagggaggaatgaagagccaaggggtctgaaccaggttggagaaacccacaggaacagttggcctgaacaagggagagcacatcgaccccagatgctgtctgggaggccagtacaagactgatccagacctctgaacatggatgtcaataaggaggcctcagcactccagggagcctctggtagtggattagtatttttccctggtgtaagaagggactttgagagcctatcccacgtgaagggttacactctggccctggacacatggggaagggcccaggcccagcacaggaagatttggtggacaacagagccccccgttgagggccctatcctgcctggggagtggtgggtggatggggtgattgatggcctttctgattgttattatagttaggataattaatgtgcaggccattagagaagggaaaagataaagcttacctgatatccatggtctagttattagtctcaatcctgactacatcaaaatgatctggaaggctttacttttcttaaaacacctggcaacattccatccctgatatgctaattctcaggatctccaaagggtcatgacacatctgcatgttttgttttgtttttatactattttggaagtaacacaagtcactctgttgtgttcttaagggtgaacctaaaaccacaggcaaaggtgtgtgagacacttcatattaacattgacaatggtgatgatggacaaaagcccttcctcagtcacaaaaccagacggaatatttacattctcagacagacgtcagatacaacaggctctgcagtctcataaggacacagccagttaatcataggacatggatttttctcttctcttacctatgacaccaaagggtttcatgtcctggataggaattaataagatctgtgcagaattccacttcttcttctaggagctgggtaagatttatccttggttcctctgttgtagctgttgcttcttcatcttttggctcatttttcaaagagttgtgctgcagtacagaagcgtccattgcagtctggctaatcaaagactttaacagaaactggcgatagtgaaatccactgtggtctgaaacatgcatggacgcccagtgtttagtagaagacagctcatcaagaaggatcttgtaggaagaaaatgggaagtgagaagcgcattacaaaggcttgctttctccattgtcacctgtgctgtctctgattccctgtcaccagtctcttgtatacaaagtcccgcatgatgccctcttagaagctgaacgcatgccagcttccctagtcccttacaaagggagaaagttttttttttttttttttttattacagactttaagaacttgtcatgatttcccttcacctaaccacactgtgaatggccaacaaattcgaaattaaagaattttggggtatttatttacaagtaatactattgccgatgagaaaatacacaacataaattcaggcgattttgattcttattatattcaatacttatattctacttgtaagaatatgcactatactttcagtaagagaccccacctgcttttcacaatgaatgatgtaaaggcagagactgcagtttgtttctacttcttaatcgtaagggctaagcataaactatgatgcacaaaaactaggattttacaggggttcacaattgtcactctttgtctcaaactgacagtaataagtggatgagatccaattaggttctaaagtatttaaaacctatttcaaactaatgaatttcaaaaggaatgctaaaggttctaacatttgtgaagcaggattatttggacagctgatcatgaaacatgccatcacaaacctgacatgttccattaggggagttgttggggttttgtttagttatgagacagagtttcactctgtagcttggacttcctggaactcactatgtagcccagaccggcctcagactagcagtgatgctcctgcttcagcttcctaagtggtgggaggacaagtgagagtcaacatgcctggcttctgtagagggtttccaggcaagctaaagaaaagaccacacacttgtgagcagagaacaatgtagatcaaatgacctctacctgcttcaaagagtccagcaaacgcttttcctgtaccgagaaaagtctcacagactttccatttttcagaagaaagcttgcctttttcagaagaaagcttccctttctgaacctccagtacttgtacattttcacataaagaactgctgtgtgtgtcttcattatcattaaattgtaaagatgttttatttttaatgtaacaacaaattggcataggatatttattcatccttagttggtgtgtccattgtcttctgctcactagcatcaatgaatgaaaaatttaaagaaggcaggactaagattactagcctggatgggcaaagtatatcatttatatgttttcacatctcctttaattttttttttaatatttatttcactttctctgagacagggtctggtgatgtagtccagacatgcctagaactcatgctccttctgcatcagccccttgagggctggacccttaacttctaaggggttcaatcactaccgctacatttatttacaaagctatcgggtgaacaaacccagagccatttctacttgagtctgtatctgaaaaacatcattttaaggctgctattattactattattattatgactctgcccactgtctgtagggcagttagtcatctatagaagccagtctggcttctcaatatggactggcaataccgcagctatctaaactgaatgtatgtaacaacatggaaaacctttggaatatttctgaccagatattactctactttaaaaaaactttaatttactatttaactttacgacaaaagcaacacataggtgaaagtttttcaataaaaccaatttaattattttaaaaataatattaaaggggctggggagatggctcagttggtgaagtgcttgccacacaagcatggagacctgagtacagatctctagcactcacagaaaaaagctaggcatggggtggggagcacacatctgcaatcctgtgttagggaggcagagagggggcgatctctgaggtttattggttagtctagccacttcagtaagctccaggtacagtgagagactgtatctcaaaaaggtgggggctgaatacatgcctccacggtcaaagttcccagtgcccatggagaaagccaggcatggctgcgcatgcctggacctccagcactggggatcagaagcagggagataccaagaactcactggccagccagctagacagaatggtgagtttctggtacagtgacagatcctgtagccgggcactaagataaagagcaagagaagaaggcatttgactgcttgctctggtgcacacaggcatgcttacctgtccactcacatgaaaacaacacgggaggacagggggagagagaggagagagggaagggggagagaaggggaggggaggcagttggggtggtggagcaaagcaactgaaagacctccccaattcatcctttggcctctacattcacacatgtgcgtgagtgtgcccagattaagacttttttaaagaaaaaaaaaaaaaaacaaaaaaccaaaaaccctactcttctttactctgtttgtaagaatgcatatcaagtcagagaagaaacaaggaacttcagagcattttcttattttaggtattttccttaaaaaacaacaaacaaacaaacaaaaactagaataaaagctatataggcaatgatttaaaaacaaggacaacaattacttttaagtgactttaaaaacacaaaggaatggcttaagtgtcaggtactgacaaaatgaagcttttttagaatgtaccttaagtgcccttattctcttccaacttccatgtaaaaatgtgaataagtaaacatagccacagggctatgggacagaggggttgactggctcaaaacgaaatactgaaaacacacatgccaacagtcatatacatttttaataacctttccccctggttatacaagtcctggttaggttttcccaacatgatacaaaattaactcatttacgaagaatgaatcttacttcagaaaattcctctatgagactggcctgtagacaagtgtggtacttgtcttgattactgattgatgtgggagaggccatcccatggaaggcaggtggtcctgtatgttacaaataaacacactgagtaagctatgaggagaaagcaagccaatcagcagtgttcctccatggcctctgcttcagttcctgcttccaggtttctgcctgagttcctgcctgacttcacttagtgatagtgtgacctgagctataagatgaaataaacccaaccctaactaagacagtggaactagctcttatagaccaggctggtctcgaactcacagagatctgcctgcctctgcctcctgagtgccgggattaaaggcatgtgccactaccacccggcttaagatcaagatcttaactcccatcccagtacccagcacatcagctaggaatgacatgacagtactaaagtatttctcatgaataaaacttcactgagccaatcaagctcactagctgctcattttacctaacctttttattgctgaaaggacagagaaagaaatctgtatgaaagaaactctctcaccagtactctcatcacagcaactcaggccattctcagactaacctcaagacagacagtagagtccttattttaacaataaaatctcaaggaattactttccttgtagaggtcaaatatgaattcaggctgatgtgactctaagcctctgctctgccgactcctggtacttcccgcctgaaactcacagacatatgaacagaaatggaaaggtctactcttctataagggttggcttaaattcccttgtaaatgacaactacatttaccctggaagacttctggctaggacacagggaggaaaggggaacggggaaggcagagaggacattgatggtgtgtcagtcacagctacagggagctctctgtgaatttaaatcacatctggggcatgctgaccttcaacttcacctcttttaattgccccaaccctggggagtttttagaacagcaccatatattgtcatgttattctaacgccataaacaacaaaggaaaaatggagatggttttgtaacagaaaagggaacatgaggctattgggctaccactctgttggatgagaactaagtactccaactgatccaactgtgggagtctaagtctcaaaatactctggaaacctcccttccccaaactaaagaaaaaggtcaaagatagtcggtgagagccacactgaacctttgtaaaagacagatggtgagagccacactgaacctatgtaaaagaacttatacgtagatcccaccatcattgagatgtcataggtctgcaggggcctcaggaatcccaaggttacaggctctgccaagtctgtccctgctctctcctttcctatctgagagcaaagggtataaagaatgcctgttggttcagctcactgacatgtgtccagagatcaccatgaataattttaattctaagtagtttaataatcttaatgagttgtactgactcttcctatttggttctgcatgcctttggtctacaaatgtatttcctttaccaatgtcccaagctgcacctgtggggaatgcaaacccttttgtaattatgaggctttctctggaaaccacaactgtcttgatcctctggggctgctggggcattactttccaggataaactactacagagatttaaaggatgggtaggcagttttagccatggagaaagagtaacagccttaccttgagatccagcttggccacattctgtaaaacccagatgcgatgggaccaggcattatagttgctgggatatcttcctgctgcctcactgcagacttccatctcttcctgtattagtcgctgtgtcctctcttcaggaactggtcctaagtttcctttggccacagaagaaggcaaggaagtttcctgacttaactgctgcagcacccagcgcctgttaacatggcatcagggaagaggaaggaagaacacaagtgagagagcaaaataacccagttcccttattcttagtttccatgtagagagatggaaaataatagttgtctagaggttcaggtatggggatgccgagggggctgctgctactatgctctggaatacaattcaacttagtaacatcagccagaaggggcataaatatgacaaacaggaaagagaaacttcgctaaaactttaaaatctcttaaaaagagaaggtcagcagctccaaaatgacaacttccaaactgtacgtggccagggagtacaaagggagccagtctatgtgcttgtgtgtggtgggctgggcgcagggctgactgaggactctggcaggagggagcagactcatgccttcaattttatgtgcatgcctcacccgaacctgtctacaagcaaaaagcttcattttgatagcttccattaagcaaacatttgatattatagcataaattgtaggaggaaataaaagacattgaagcatcaaggtgtaaaatgacctcaatcacagattctccttttgtccatgtataatttgcatacatttaaatcaaatgcaacagaaaaggtttctaaacagttcatattttttttttgtggacacactatcagactaaaaaatttccaatccaaaggtacagaaaaatgagtaagaaaattcattttatttttaaacaatgaagttttataatacaacacctttgtttttaaattacagatccccaataactgagatacatatttatttaatagtttccttctggcatcaaccccaccctccgcccaatgctagcacatggctttctggagcaaaccatgccaatttctggtaagaagaaaatacaactgactgtggtttgctacagtcaacttacaatgctagccaaaggcaaggttatggttatgcctaagaacccaacaatgttcatgaatgagaaatgttagaggcataattagggcaaatttctgagagtaacttctccatgacaccatgacagcaggctacaccactgcattttagtcaggtgagaagaggtacatgagctctcagaaaagcatgctttccaacaagaattttcagagtcctacttgtattctggctgtctcaggttctcaccctaaaaatggtctttgcattaaggttttaatagctttttacttagcccatacaccaaacacctgttacctttagcttcctttaaaatttaaatttttaatcatcacaaccatcagaccaccaaattcactaggaatacaaacccaggtattatagttaagtatctaaatgcaatttccaaagttgccacagatgagttaaaaatagtcaaccttcttgatcaactactctgtttaatgcacggtagtagggcttgcatagatcagctcaaccatgaattctatgagacaagtataattattgttcacgttttatgaatgtgaaaactcaaacttggaaggacttgctaccatggacactgaggtagcaagggattattcttagactgaactgtaagttatgtgactttagaattcaaattctgaatgaacacataacagtgtttcataagctgtgatcttgaatactgaacagagatataaaactacttatcaaatcacacctgtgaatccatgtctctggactcttaggaaacttagttaaggccaattttcccagatgtagatccttaattggacttaaagtgccagaaaggatgagctctttcctgtaacaagaagaaaaaaaaaagtgttaattttcaattcaagcatgttgcttttaataaaaatcccatggtgaatcaccaagaattattaaagaatgaacaaaaaaaaagagagggggaggaaacaattcagtcaggaaagtgcttgctgtgtaagcatgggagcttgagtttgacccccagaaaccacattaaaaagtaggcaccacagcaggtgtctgtagtcttcctactggggaggggaggactgggattgttgggcttggggctgtgcatcaccatatgcaaatccccatttttaaacattacagtttaaaaacagttgctatactggttagttttttgtcaacttggcaaaagatagctaggatctttatgccaccataaaattggcccatggacacgtctgtggaggctttttcttgactaatgattgatatgggagggcctgcctactgtgggctgtgctactgttggcctgagttataaagaaacgtgggctgagcaagccataggaagcaggtcagtaagcagtgttcttccatttcttctgcttcagttcctgcctccaggttccttctttgagttcttgccctgatttccctcagggatggagtgtgaccccagacttctaagctgaaataaaccctttcctccctgagttgatttgagtcatggtgttttagctcagcaataaaccctactaagacaatagtcaaccatggcttgaacatcgtaaatggaagtggctctgggcatctgatgaaatcatgtgttgcatgactagggctgtgaattctttgtccagtgtgttcatgctatctacagtgagcatcaacagcaggtttgaaggcacaggggccctgcatgtatcttcccagggtaagaagagactgctgtttgtattttgctactcaaatcattccagcttctgcttccagaagttctcccaattggcctttgtgcccctttaacagttcccactgtattttatttttagaagttctttctttctttacattcttgctctcaagacgctccctccaggcccatttcatatactactgccttggtctttgattcagtcatttctccagtgggcccagttccttctaccagggacccagcagtttcatatggttcaatcaaatatcctaattttacagatgtgctaactcaagtctgaagaggctcaggagcatgctcagagcagcagaaccatcactactattcaaagacatctatcaatagaagttactcaaatttttaaatccagtataatgtgatcttgttcacaacacacagaaagttaaataaatataatctaagtcatctctaatgataaaaaattgtaatttttatggctctaccctgtgggaaaatttaaaataactcagaatatacaacagacttcatttttacttctcattcattttctgctttccttcaagaaaatttgttttaggctaatgaataccagttgatttaagttcctatacacatacgtcatgtaactgaaaaacaaaacaaaaccaaaaacccttcaataataatgattcttgtctgaattaaccaaatgtgatccttctcccaagccccaaccatcagtcattttaagtggctctcacagtaccacagtggttatgactaaaagatgactagaggcctgtggccttctgtaattatctcacacacctacctgctgttacaagcactctttctggccagcctgattccacagtcgcatcagccccaaatgaacactcagatgctatattaattataaatctgttggccgatgactagtgctttttattggctagctctgtcttaattattaacccatttttatcaatctatatattgccatgaggctgtggcttacctagtaatgcctggcatggtgttactcttctagcagcatcgcaactctgtctagcaggttcactctgcctacctttcccagaatcctcctcctctcttagccccacctatcttcctgcctggccaattagtgttttattcataaaccaataagagaaacatatacagaataacatctcctatcaccctgcattccagtgaggctaaactatccatgcctagtgatccaattagtagtcatacaaaatgcttgtgattcccccaataagcaggcatcaaacagtatattgtaactcagtagggcaatctatattttagggaaaaaatgcttatagaaaagatagttataagggggcacagtagttagactgtcatggagatattaaaagaatttgcataagaagcaaagttagatgctatgggcaaatggtttatatttcatttccaagtagctaatagagtcgtggagttatacgtcttcagaagtctgggcaaacttcactttaccactgaagaaaattacataccttacattccatgccgtggtgaagtctgggttgagaagcagcagggtgcaggtgacatctatcaattctaaaataaagagagccgtatcaagaacacagtcctgcctgtcaaagcctttcttcaaaggtcctcgtccattctcattacaacctgtatccaggttgtattaattttaatgacaggcatactattctaagacatcagtggtgtaactgttatcttcaagattttcttctatttgtgatttgtacaattattttaaaaattaacaactttacaatatgcccataaagaataattaatcttctatccttttggtagatctagcagtaatctaatttgcattaagaaataattttgaaatcaccattcatttaattctaccaatatcttaagcactaagtaggacattttcagaggaaaggagagaaaaatcacccttaatctaatttacgttctgctgcaaaaaattccctttcatctatacattttacatagtgatagcaatgataaaagtacagtgagcaattttcaagacttaccgttctatttttttaggatgtatttcctgaaagagaatcaccatggcaaaacaatgtgactccgactgtgttacagcttgtcctctaaatggactgtgactattttatacttccaagagtaacatgactacttatgccccagttctaacctactataattatatatatatatatatatattataatatatatatatatatatactagttaggtgggctttcttttttttctccattttaaatttaaattagaaacaagattgttttacatgtcaatcccagttccctgtccctcctctcctcacctgctcctcactaacaccctacctatcctataccatttctgctccctatgttcatagcagcactatctgtaatagccagaacctggaagcaacctagatgcccctcaactgaagaatggatagagaaaatgtggtacatttacacaatggagtactactcaacagaaaaaaactcaatggaatcttgaaattcgcaggccaatggatggaactagaagaaaccattctgagcgaggtaacccagtcacaaaaagacaagcatggtatgcactcactcatatatggattttacacatagagcaaaggataaccagcctacaatccacaccataggcaataaggaggactattggtctacaaaggataaccagcctacaatccacaccataggcaataaggaggactattaagagagacacaaatggtctcccggggaaggggaaaggaacaagatctcctgtaattatattttaaaacaacaatgtgatgagttaaaagaaaaaaaaacaacactctactatgttttatctgacatgtttataccttcagtcatatggtcacttttcatttttgttttctattttcagttcatttaggatattctattcttattcactagatatttattcttcaaggtcttaataaaatgttcatggacacaaataaatgccataaacctgcttttaaaagaagcaaattgataaaatctggacattttcttgttagtaaaactgaagagaattttagaattgctattatcaacctagagacatatcactaaagtaggtaatggcaccagtggtattaaataccacgtggataaactatagaaattggtgatagaccttatgtggcgctgctgggagcagacaatgctaagtgctttattcatgttagttcactgcattcttacagccatgacccaagccacttctgttcaactttacagcaggaaatgaaactcagagggttattgaagattatttttattttatgtatacagatgctttgtctgtattttgtttgtgcaccatttgtgtgccttgtgcctgcagaggccagaagaggtcattggatgccttggaactggagttatagacagttgtaagccgccatgtaggtgcagggagtcctgtggaagcagcaagcagccaccaaggcatctcttcagccctgagatccagagttttaaccaactagtatgtgacaaggttaatacctgacactttggtcctatcagttatactgcaatggaaatacctggcctatagagataaatgaggcattgaagtactcagtacaagataaacttcaaacacagagcaaacacgtaagtatctcatatatacacttaaaaaatggtccagttaactatcaattattctattatcacataaccttaataaaaagattagcatttgttcggcacttatgattctcctactactgatcactttgagcattcaaaaactgagaatcatgaactgcacacactgacttgtgaccctcattctcccactctaagtccctatgtatgagcttgctgtgcatataaagaacaatctaattcgtatcctttttctttcatttttaaatagtttttggcactaatttactacttgccaaggaaactaatataatgttctatatcactattcacttaattccagaaatgttctaagtatcaacaatgagcaaagattaaacaggcccaggactcaaagaacaggtataattctaataagacccgatcttacccttcataaggttatcttcttgatggagagggcaaacaaaggacatatacccggggccttccacagaagcaatgactaattcttactagtgtacccatggggcctatgagtgcagtggtaaaggcactgcagatgtcagagagtgtgggaaagccaaagtagtgtgatgtcacatacagtgtgctccaagagactttagagcacagcacaactacagcaccaagaagcaattgctattacactgaaactggctaaactcctaaccttagagaacagtcatcagtaccccaccccagcaagcacttacagcacatgggaaggtttatatgtgatagggagttctttgatgtcagctattgttccaaaagctgatctactccctaagtaaactggctctcggtccctatgtgctttccacagtacagaaaatgtacaatgagtgttacttctgtttgtacgtttaatgccaactctcctcctactccctactagtgagagtgaagcctctgtacagtagtgcaagcggagctaatgaacatacaaagtcaatactggtccccaagcagcaggaagaggctgtggaagaagacgcatcgaggcagtgcttcctttctagagacggctgctgctaggatcacagccctgctacacttaactaggaattctgggcaaaataaatatgtaagtaagttgctcaatctcatcatgctttagtgttttctcactataaaagaagctcacatcagagctagctcatagaagtgttaaataattaaaagcctgaagtgtcaggctgacatacagtgaacactgaattctgaatgctaattttcattatgaagtctgcatctcctagtcagttccacaagcactactaagagtggacgcctagtaggaagtgaagaaatctgagctgggcagtgaccacgtgcagagggataactaacaacatctaagaatcttggcatttgaaacaccagcagccttgacagccgtcacacaactagggttttctccgcttcacaaacttctcatctttcctgactcagaagtcagttctaaggcaagaagtggggagaaagtataacgtaagaaacaggacagggccaaccaagacagagtaatgaggccagaaatggaagagtcacatcagcaagaaaatctcgaggtctcagtcagtacttcctttcagggagaagaaaggaagtaatttaacctcagcctgctgatgcactggctttgcaggtctgtcttccagcaaagcagatgcaccacactgttggcagatgctttgtcctatacaggaaggatggaccaagctctaaagataaacacatgccagtaacagttgagtgtgatgatttcactctctaaatgtcaccaactacaggacagttcctctgcagccttacccagaagacatgagcagactcttggaatcaaatgggtctctctcgagatacacaaacatagatggcagtaaatacatgctcactatacacattccaatgtgtgaataacccatcatcatctcacaggcagaaaattaatctgggtacaacatatacagggaagtagctaaattctagctggaacaagaaaagcacatatggacatgaccgaagtcacaggttaaactgatatactttctttactgtactccattttagcaataatccaggttttacaactattctggcagagaatgatttacgtgcatctaaaactaaataaattcaagataaactggttaacctccttccaaaacatactcaagtaccatataaggaacagcttaaggtaaagctatttattacagtacacacaccttgaatggtgggctaagctaagagttcttgctaatctgacaagtgacactttagcacttatgggtactgagtaagagccacaattcttgttctcagtgacctacaacctagcaggaaaaatgtttaaataacaaactacaatatactatggagagtgaggactatgaaagtcatccaaataaaggcctcccacacgttgcttcctgaagcagacagaaaggcttcccgggggatgattgtgaattcagcttgctaatgctggagaccaggctgatgacaacacaaaggcaaaataatggagtagcacacaatgaagtcagagaagggaacagtgtagatggtggctggaatgaagattaaatactacaaacagaaatgaagtcacaaaggcagcaacacgataataataagtagcaagtgacactattctcagtgtctgactggcatggagaggttacaacagtaagccggcagtccttcccagttaagaaaactgtaggttactgctgctatgtagaaacttaagactcaggccaactgatttttcaaaaaaggacagaaattcaaatttcccatcctgattttaaacacttacttaactagttaaggacagtttttgaaatatataagccaagtgaaatgtgtctatagataagtatcagcctaggggctaagaacctgcaatctgaagccaaatacgatgtggctgcaacactggcaatcaggctttagaatagaatagaacagatggttaaaggccttgaataccatctaaggaattttagtatttcattggctctgagagaatcatgaaataagatatgagcagatacatgcatttcagaaaagtgcttctcaaaaggttttatatactcatgcacgcatatataataatagtaaaaagaggccatcaaacttgagtagggggtatgaggaagttgaaaggagataacatgggaggagagggaaatgataaaattatatcaaattttttgttttgttttgtttatttttcaagacagggtttctctgtagctttagagcatgttcttgaactcactctgtagactaggatggcctcaaactcatagagatctgcctgcctctgcctcctgagtgctgggatcaaaggcgtgtgtcacaactgcccggcatattttaaatgaaaaaaaaaatgtttttgagaggaaaccaaataagatgttggaaggtgctatttgaagagactgactagtgggacaaaggacatgaataacggaagaacctggaatagcaacaaccatcattagcccagctgagaaataaaagtctagccagaaaaagaaatgaggaagaaaaaaaaatgcgaaatatatagtgtttaaatatatacagagttctgcccagctcttaatgctgttttgctggctaactttatgtcaatttaacacaagctacagtcatttgagaagagggaatctcaattgggaaaactgcttccacaagatatgcctgtgggaaaatctataatgaactttgctaataagtaactgatgtaggaggcacccattcaccgtgggcagtgccatctctgggcaggtggccctggggtgtataagaaagcaggctattaatatgagtggatgtgcctagtcttattgtaacatgatatgccaggtttggttgaaatccccggcaggcctgcccctttctgaagggaaacagaggagggggaagagttggtctgagggagaagagaggtgggaagaagggactgagggagtagggggagggagaattgttcgggatgcaataaatgagagaatgaaaaggaaaaaagaaaaaagagagaaagcaagcaagcatcaatggctctgcttcagctcctgcctgcaggtttctgccttgacttcctttgaagatgaactatgatgtggaaatgtaagcaaaataaaccctttcttcctggagttgcttttgatcatagtgttcatcacagtgatagaaccctaacacagctgtgccattctttctttcttccccctttttttgtttttttttttgggggggggggggcaggtcaataaggattataatatcagtcctctgccaaatcaaatatggctattactatatcagactgctaaaaagtagtactccctagctaaacaagacatctttcaaatatttaaggaacttagatcattaatgaaaaattaattaataaaattaattaataaataataaataataaataataaataaataataaataataaataataaattaattaataaaaaattaattaatgaaaaaatctattctgatgataaaagtcaccgagttatgactctattgcagggttctagcccaatcaagtagacactggaccacttctttaaattatcagctttctacccttgtctctttgtacatatatagctgtttctagaaaaaaagtttcaaagaaatggcattttcctaaaatttttgactttatttttctttagcaagattcagctgcattctaaatgttttgtttcataaatttggcacaatgttttcacagtagcattttcagacatcaaagcagaattaccttctcttactgacaatatgacatgagggcctgcgacactgtactgaactatgcttcctttcctacctacgccttagcttatcatagcttttacccagacggtccaagataaagtcaaaacctgcctgtgtgtcctgatataatgtcatgtgaagtcatcaagatggaaatcatgagaatagatggcagagcctgcagtctggtgcccacaagataagaatctgaaatgcacagaaaggtttgatagccccaggacaaaggtaggttgagctcaggtacatggatggacaaaatctagtgctatgagataacttagacttgatctttaagaatccttaccgtttcttctctaagacagttattctgccccactgacgtacattggctgagtcacacctctgtataccaggataaaagcaatacagcttcatttggcaagaagtaatttggtggagtcttaaggctctctgaagcctatgccatggtgacaataaaaaaggagttctaacaaaagccaaatctccttacatttgtttgaagtgtgtgccttaaactctagtcatgccattaacatcacatcagggttaggcagcacttgtgaattaggaacacatatcagaggaccaatcaaatgaaacaagccacagggaaaatagaaaccacttctcactaaaaactcagactatgtcatggtccacacaagaaaaggcactattaatctacttgggcagtcttttaaggacaatactgagaaaaattcagggaaatctgatgtgatacatctggcaacacactcttctcctaaagaggctttctggcactcatcttgaaacgtcttagctaacggaaacgtatccttcacctttctgcccacagtcctcggagcagcttctggtaagagcagtcccttggtaaagattaccaaactgatgatgaaaattgtccagaaaataaggtcttactgaaaactagcctccaggcacactggcacttgtgcagatgctgctgcacaagggaagggaaagggtttcacagaaacagaagaggacatggtcttggataagcactgcccacaagtgaggcccgaggtgagcctgaaaggctaagtaggatttgtgcagccagagctttatttgaggaaatactggaaaaagagaccaggtgggatgattagggaataccagtgtcctaaagagttgccacagtacatcggaagaatcaaaagccaagattttctttttcttttcttagttttcacgttctcattttggtactaagattcagaaagtctgatctcaattggggtccagtgaaacagcacactcgtaaccaaagatggggtaacacttgcagctaccagaacagtaccttgcctatctcatttgaaatgctacagaaacaagttccaaggtccacaaaatgttaaggggtcagaaatcaagtagttataggaactagaaaactctttggtgattctcaaacctcttcttttttattaaattataggatactatccttaaataaaatcttacaaatgacctcagcatattaacacataaatctgctgtggctgcagcaggtggcttgaattctgtctgagatacttctactataacaactgtggttacaaacaggaacatgaacatcaaggctaagctcctcatgtgacaaaggctgaacacctgctcaggcagtgcagaggagagcaaaaaccagaatccaggaatgccacccccccaccccacccccgcaaagaaagggctcaccccagaggaggagggggggtcattcatactcaccatctttgtttagccattgctttcttgttctgtacaaaaggagcttgttgtggacatatggtaataagaacttgacacaccagctctccacaccaagtttgttctcaaccaggactatgggactccggttgtatcttgcttcagggcatgggatcaggccaatttcatctctaaatatgcaagacataaaaagaaattgaagataataccgacttttaatttttttctaattcctcaaagcattttaaaagcctcatgtgtttatttctcttaagaatacacctaagggggtggtaggggtgcacacctttaattccagcactcaaaggaagatctctgagtgttcaaggccagtctaacttacaaagtgagattcagaacagccagaaacccggtgatgataaaacaaacgagcaaacaaaaataataaaaacaagtttaattttaggcagttgtggtggcgaacgcctttaatccccataccaggaaggcagaggcagaggcagaggcaggtgaatctttgtgagttccaggccggcctgctctacaaagggagttccaggacagctagggctacacagagataccctgacttagatagacagatagaaagatagacagacagacagacatacagacagacagacagacagacagacagacagacaagaatagaactaagctcatttactggagttgtagcaacaaaccattttttagtgtagttggttgacaacagtggaagtacagggaaaacagtagactgcaatcctccttgctggcaggagtgaaaattcagtttatctttagatggcaatctgaaaacacctttcagcattttaaagcacatactctaatcctgcagcaaccctaccctaaacacaacactgcagcaagacaggaaacaacccacttgtttaacagcataatgcaggtaaaggaagcacagctcagcagtgtggtaactgttaagtaatgatgcaggtctgcacatactggtctacctgccaagaacacaggagaaagcaaaatgcacacaatgaaaaagccttctaaaatacatagatacataaaattgagacatcaagaatttttttgagaaacaaaggtaataaacgaggaattttatttttatagaattattctatttttaagaatgtaaaataatgtatttatatttgcctactataataataaatgtggaacagaaacaaattattagtaaaggctagcttgtatgaaatttttgtctcattttccctctatatattgctaagttttttttaaatcatccctatgataaaaatatcaaaatgcaatatggtcagtcaatccaccttaagttgaaaatctgcactgaaaacagagacttgattattaaacactgtgtgaagcatgtgacttcacaaagcaaatgaaacaaatagttataaaaaccaacacacatctttcatctgcaaaggtggttaaaattcttacctacacaatttcttaaataggatgtctgatacttaatgagtaatgaaacctctaggagaggggctggggagatgactcagaggttaagagtgacttccgattcacaggggacatcagtcaccagcaactgtgttgggatgctcattttgacatctaagtctagcaatggggggtctaacaccttcttctgatcttgactctaacaataatagagagctggaaagatggcttgaattagaagcatgaggatgagttaggatccccagcacacatgtacagctgtggccatacttgcctgaaattccaatgcttctggggacaaagacaggagagttgccaggaattctggccaatcatcctagccaaaaataaagtgctaggttcagtgagagaccttttttttcacaagaataaactgaaaaaatgacagaactgaataaccaatgcaattatctggcttctatgttcctgagtccaaagacacacgtgtgtgtaccacataaataaaccacacccacacacacccacacactagttgaaaaatttttttaaagctatctttaaaatctgcctgttcgtttttttttttttttttaaagactctgtgtggtggtgtcccaggaagtgaaggtaccagattccctagagcacaggtggttgtgagccattggataggatgtggatgttgatacctgaactgtcttctgcaggagcagcatgtgcttgtggccactaagccacctttctagtctcacatctcgttttcacacacacaaaacaatagggctgaagatgccgctcagcaggcagagtgcttgcctagcattctcagagtcccaggtttgaccccaagcaccacctaaatctgccccgatggcacatgtctgcaatctctgtactagagagacagaggcaggtagatggatctgtgagtttgaggctagcatggtctagccagggctacacaaagaaaccgtctggggaaaagaggaagagagggaggggcgtgaaagcagcataactggaagtccaaagccatcctgggttatatagcaaatgggcactacttgagatgctgtctcccttccccagtcaaaataaacttaaaaaataagcaaaaagttgatcttcagaattaatgtgtggcattgccatttcttttgccaagaaactggtctgatagttttttggttgtttttttttcttttctttttttttggttttttgagacagggtttctctgtggctttggaggatatcctggaactagctcttgtagaccaggctggtcttgaactcacagagatccacctgcctctacctcctgagtggtaggattaaaggcatgcgccaccactgcccggctctgatagatattttttaaaagggtaaacttgtttaattacaaattatgagaaagtcctcttctgttaaattaccaccacaagtaagaagcacatatctaaaatagacccgcccagaaaaacctccacactggatagttcagacacaacccactctctactgatcacttcgttagtgacacaaggatcagtcaataaaccatggtaataacatttcttccaaagtacttatcacttccgaagactttggggcctacaatacaacccagtcagtagattcacaggtctcttttttaatatagatgcaccacactggtgctatcaccatataaaaacaattcacagaatatactgcatatttttagtttctgataatacaaaatgaataaacaaaataccacagatgtctaagagtttctctgtaagatatctgtatctacaataaaaggttaccacttggctcttcctgtaacacaaatgaagttctgtgggggccctgagagagtacctcaagtcaatattcagtgttcaaagcacacctttgcatctatctgtacttggtcctaaaagcccgaatccgcctagcgcactctaagcacaactagccatgcccaggcattgggctaatgtgtggacctctgatgtttcctaatgctcatatttttgctatatgaagttgaacattttaagaaataacctgaaaacagaaaataacttgttcaatcccagcacttgaaaggcaaaggcaggtggatctctgtgagttctaggccagcctggtctacatagtgcattccaggccagcaaggactacacagccagatcctgtcaaagagacaaacaaaaaacaaaaaaccctaaaattagcaaaaccaaatgaaaagaccaacccctcaatttaattactcaagatattctgttctctgagatctaataactacttataacacttcaaggaacctcaggagctaaaaacataaatgttacaatacaagaataaaagaatcccagcttccagatatgtttgagaagaagttttttttatacttaaattcacaatgttaaaaagaaattttgctccctatagttgtactaaatataaaatattcaagtactaacttggtacctaaattgtaggacaaagccatctgcagatgaaaaaaaaaaaaaacccaaaaaacaaacaacaacaacaaaaaaaaaaagcatactactgtggctgactacccttccaagaaacaaagggccttggggacagcagtgctcagtaactgcatttgaatgtatggtcatgcttgatcctcagtgacatttacactgctttcaaaggttattccaggagaatattacctctgctctttgtaatacactgtgccgagaacagcacaggtcatttaacatgtaactttagcctccacagccctactctccccatctgtaaaagggtagaactctacttcatctccagtaaagaaagtgggctagagtttactcagctttccaattttatacagtgacttgacacctattcccaggtgaagagaatgaaagggtcataggatgtcaacctttgaagaaaaaaaaaaaaacaaatgaaaagatgcagtattacagagtcaaaagctcttgataactgcccctgactaattagtttcccttctaccaccaatggccattgtgtgtgttgggttgtttacctctggaatgctcatctgaaaaatggaaatataatatcttccctgcttgttatgaaaaccaaaggtgaagaaagtgctgggcaaagataaaggttatcaattcacttaaaagcctgaggtcagtcaatgtcaagtttcttggttagtgggcaatagaaagatgagtgttttgttacttctaaaaaatcacagcattttctttagaaagatatgtggtccataagcttcaaaacaacagaaagtttcaatttaggtttctatatctattcctttagattactgtgtaatttttcaggcaatttagaattctaagtcattatgaaatgaagaggaatttcattcctgtgtctccttttatcagatgaggtccattgagcttaaggggattacctgaagtcaatatttctagcagctatcttgggaatctgggtctccagtttaaattacaatttcatactcaaaaagtagaaaactcaggaaaaataaaaactaaaagccatctttactgctactaatgtttgggtatatgtctttttgccctcctcaagtatttttacagaaagtgagatcacatggtacataaacttttgacaaaaccgagaaattaacatttagattccctacataattgataaatgcttacaataactatgagcatcagataattttcaattagtcctttcactaccacaaacccctccccccatatttttaagtttctagaaatttagagtgtctgtatttaatcatttgctcaggaaaatattctttgcacgaccaaggtcaggggttttcaaagaaaacccaggtcaagggcatcaaacaatgattaactgccttgatgggactactctgcacacaacatggactggagcagcacattcacttccggtcacacacagcaatagtgcatgtgtttggaggtctcacgttacagtggaggtccaatgagttcaaggttcgtattacacagatgtcagctctgtccccatgtgcagcagcttctctggtctgtatgttgtagaaacagcaactgtcatttatgagttacttttatctacggcttactttccgatccaaaagctgtgtcaaccaagttcccttctaggcaggatgcattgtccccaatactaaacatgaactctgtaaagtgttacaacaaaacagaaaatggcccagattcaggaaattttataaatatctttattaaatagttatttttgttttatacgctggaattctttctagaaattatcaaaaaggaaacttgataaaatatctacaggaactgacacttgcatattaataattaaaacttgactggtactgaagatatttcagagacctaataggcttcctcattgattttaaagttaactttttgtaccactgaaaccacattacttacactatttagaaaacagaaattgctgtttatttcataccacattctatgtttactctatgtaaaaatttacagtaaaaatctttgccttattttatagttaagatagtcttatccagccagcgttggctcatgcctttaatcctagcacttgggagacagaggcaggcgatctctgtgagttccaggacaggctccaaaacaatacagagaaaccctgtctaagaaaaacaaaaagaaaagaaaggaaatgaaaaaagatagtcttatctaagtatatcaggcttgcaaataaaatgacaaggttcaagtccaggactcaaattctaaataaaaatttaaaaactatactatcatttaattgagtaaaacccatgtatacaaacaaccgttataaattctgtgttttcatattcttcaacctgcagacaacttgaaactgtgtttcagtattactcccttattaacaattttctgtggggtcttcccattgattagaagtgcatcatcacttgtgtctctattcaaatgctagttcctctgaaaggactatcttgatcttataattccaataaagtctcctaggtatcactgttgataatgtctttcttaccctttctgccccctctcacaagtgtgtgttcattaatccatatgttcagctcccagtacggttatccccagactaacattttgcctgtcacatgggagtgttcttttgctatacacttgaatgcaacaattacgccagataggcaaggacttctataacccattcctgtggaatcttttcaatcacatcttgctgcttttgatcaatgtactgctcccagtttcttctgacattgtaagtcctacccagattttgatgttcacgctaaaagctgcctcccctaggatacactcagcctcccttctcttctgataggcagcacttacaatactgctaactgtcactgagaactatactgtaggattaatttactgttaagtcttaagtctccactaaacccacactacacaacatagcacttcttatatgataactatgctttaaatcaaaagttcatttctcattaagtacattccaagtattcaacagctacacacagctaataaagcagatgtacaattcaatcataccagaaatttggcttcaatacaagctatattttgaacttcttggcccatatagtgaataggctacctactgctcctcaaatcaatgtagatattcaataaaaaaaaaaaaaatcaagttgctggatgtgatgacctaattaggctgtacagtagacaattgtcttccatattaaggcacagtctatatatacttcatggtaataaatattcctgggttaaactactaattgcaggaaacccaataagattcccagtttcctaccaaacaatatctatattgtgttttctactttgtaaagtgttctggcaaggagtgaagggactgaggttaatgctagtgcttggaattctcattagccctacaaaatcaagaagacactgagcctcggggaaacaatccatacctgatagaaacacattcctagctcttattgaacctttgactcttcaggaagatagttctacagaaacaagttaatatattcaagggagtagatgttaacagataaattggcaatcaatctcacattggagaaaaagggaaaacaaaggtcaaataatgaaaagcttttataatactgttattagatcctaacttaaaggtagacatctctttttaaaaaactataagtagcctggcagtggtggcatactcctttaatcccagcatttaggaggcagaggcaggaggatctctgtgagtttgaggccagcctggtcttcagagcaagtgccaggataggctccaaagttacagagaaaccctgaatcgaaaaaccaaaaacaataacaacaaaaactagaagtacagctttttggggtaaaaaggctaggttgagcaaagacatcacacttctgacaggtccaatgtacacgacattttaaaagacaatacatagaagatacctctactgtaggaaatgtgtactagaatacagctgctgacaaacgctaaataatgaactgagctgtttaaatgtttacagtttacgtaactcattatttcaagtacccaacttatctcaaactttcatatctcaaatgacccaaatacttacaatcataagttttgatagagtatatattaatgagactgagtgtaaaaaatatgatgaagagaggggcatcaaagccctttaagagttttggaaaatgtgatctagaaaaacagggacctgctccacacctgagtcaacctatataacccattatcttaatcttagttttagcaaatatatttttagtctgcttcaaagatgagaaactaaagtgatcactgtattagacctctaaccttttctacgattaattttaaaggaaaaataaaacaccaatgatgaaaaatgaacccttcatttgaccaaccttttttttgtttgtttgtttttggatgtgtctctttgcactgtggctggaattctcaaaaagggcctcaaagactgacacacaagacatcaaagcattctttaaaaggcccagcagccactatggctactgccaggaaatcactccaaacattcattctgaaaaaagtcaacagtcaaaagaggaaaggaagaagactgacagctcctaagctgtcagagctagcaggtatgttttgaggccagtagtcttttgtctttaatgaagtacagttttaagcccctaattgccaaaagggagcaggccatccgaggacttctaaattcttttatgaacaccaccttggagaaaaagaacactttgttaaaatgtaggtttgtcctttcatttagtcggaaaagctaaggaggctggaatgtttaaaaataattcatgtgttctagtttgaagatattaaaaataaattgtagaatcaaagagaaaataatacaaaactagactccatgtttgtttccccaggggagggcaggggatgggaaatgggctacagtcttgcttctttctgattcttttgtaaactgatgtaggtaactcttttgtagctttcttctcattcgttaaaggtagagaaagtgccagaaagaataaaatcttgagagtttcttcctagagaatcacaagtaaatggaaagggaggagaaggaaaaatgtgtcaatactttagtgaacttatagagggcgatgacgctgggtaagaatgccctaagatgcttgtctgtaacttccgacgcgcttctgataaaaagtatccactttgcaacagcttcatgagagatccacccaggtcaccttcaaaaacggttacatccgactagctttgcaattttgtgacaagtgagtggaaaagtcaaaagcagcccgcagtcacctttagcaacccgaaagggggtgcggggaatctgatggggtggggaaccctctgcagagccgcctccgaggcacggagacccacacagcgctggcccgcggaggaagcgcacccaggcggagggcggccgggagaagagttgtcacaactcccaggacgcgcccggcagggcaggaaactccacgctccgacgtggctctcggaggtcgcttcccagcactggcccgccacgcgccctggtaacggccggctggcccggcgccacagtccctgccgcgcttcgcctgtcggaagcgcgcgtgggccccgagcggcagccgcgagtggaccagagcgcggcaccggcccgcccccgaagcccccggcggcgcagggcgcgcgactcacatgtgcgggttcctgcggaaggcgttggtgatgtccttcaccaccctctgcaccagcaccgccacctcctcgctcgtctcggccatgttggcggccgccgcgatccggcgcgcctccgggagaacccagccgccggcgggagttcggcgggcgcgcgcgcgcgctggctcaggcgcgccctcgccggggctgccgagcacttccgggtcagggagggctgcgtcgctgctgagttgggctctctctctctgctcctcgggttccattaaattcgggttcgcttggcttgcacgaaggagggtcctttccgcacctccccgagcaggcgtggcccaggatggtcttttcccagcgacctccggacggcgggaccaccgcagcccatcctgggagggttgttgctgacctccttttgcacccctgtgccactttgtgtttctgaaatttaaagtagcccgtttaattggaactcttgtaattcattaagcaaagaaaaaggatataaaggaaaaaaattaccctccggatcaagggggaaagaaaaaaaaacacatccacgactgttactgatttatacaatgtttggaatgtgttaatttggagtataaaaaacaacaacaaacaaacaaacaaaaacaaggccctgtggtaatttgtccctgatgtctattgcccgacaaataacttttataggattgctctgttccatgtggattttaaaatgctgtaattgcatttttatatatcagtgtttttgttttggtcttttctgagtacaaaaatctgacagccttccactggtggtggtagttgttcctcatcctcttcctccttctgttccatccatgttcttctcatacttgggagtctgcatctttttaaaaatatttgcctggcaaggtgatggccagctctgactatgatcccagcacttgggaggtagaaacagtagaatgttaaattcgaagtagtctttgactaggaactctaaaagccaaacattttacaaagcaaactatggttggtcgttgtcctggtcaagaaacaagagaaagtctacaaaattgtagaaagcaagaaggacctgtttacaacacagtaaaatcaacctatctttactctcagacaagttctaggatgaagcagtgaaatgattggggtgttaagatctctgggcaagaataatttcaagagtcctgtcgaagagtatgatactaggggctggagaggtggctcaacaactaagaccatttgtttgtagccctcgaaaccacctgtaaccccagctccagaggatccaacaatcctcttctggcatacacacacacacacacacacacacacacacacacacacacacacacccctttgaatttttttaatatgatgcaatcctccaatggcttaagataactgctaagtctgcctcttctcatctggagcttccatccttctgttagtggcactagggaatagtgctgacttctgagagcagggctgaaggggcacaccaagaagtaggaattttctaatatacttgcatttatttagaaaaaattgaagcttgattgccccaaatcttgaaataaaactgatattccagaaagataatatgtctgtatggttctgtaattgtcctttctccatcatctgtactcatatgaaaactgggaattacatgccttagggttctaagtgttaaaatgatctcacccagttattacagatctaatatgtatagaactcaagtgtttagaactagaatgtgttagaacaagaatccaactcaattttatcaataagggctgaaatcctaagaaatttggaattgaaattcatgagcccttattaatgatatatgaatagtgtatatgatttaagaggagtttgtttaaagatttatattgagggccctacaaatatgtagcaatgaaatatacagcgaatagttcagttgcctaatgacagaagattgattgggttatggtgaggggctgaggagatggctcagcaagtaaaaatgctagtgatacaagcctgaagacccgagttctgtccctatagctgacagtagacaggaagaaaaacaaatccagtaagttgaactcacacatgtatcacagtcacatacatacactcataaaattcctaaattatggctaagttttataagaaaacattgcctcatcaccaaaaaaatgacatcataactaaagaactatgcagttggccctttatcagcaagctccacacatggttggctgaatccaaaataagtaaaattacttggaaaaacagtgcatctgcaacaagcttgtacatacttatttaaaacagactagaagaatatacactaaaaaggctaataatggttatctctgtatgatggagataattgagacctataaatacatgttctgggggccagagcactttaactatttgaatgctacatgggaatgatattctgtctaactgcacacgagaatggtgttctgtctgtaattccagctctggatggcgaagacagtgttcttaaagcaggctggctaactagactatctgcattggtgagctttcctcaaagtgagagacctttcctcaaagaatacagtggaagagcaattggggaatattcccagtgtcaaccagggacctccacatgcatgcacagacaagcacacataaacgcacagaagatcacacagatggaaagaagaaaaaacacacataaatatgtacacacatacttacaggatgctccaaactctatgaaacataagtcctaaggtagatgttgagccctagaaggaacaagggtggatactagactagttttaatgacatttgggaagagatgaagatgactttgtaatctatccatgtctttactctttgtattattctacttacatatttctctggtactttgtgcatgtattccatctacttttagttgaagtctacattgtgacaacattatacaaagttcatatggtaataaaaacccagagatagatattggtgttcaagctgaaagatcagagaagcaaagcagccaagtcctagagatttctcacctctaccaatgctcagaatgaaggggcaattgtgtcctctggttgcatctacaaactgcactgccctccacaaagcctcaggaatctaaactgcaatcttccgagttcctgtctcctccccccccttatattcttctctccacgcagccatatcactcccatctccacctccctagtactgggattaaaagcatgtgatcccaagtgctgaggtcacttttgtgtgagctgtttctcttttagaccggatcactttcatgtagctcactctggccttgaactaacaaaggtcagtctgcctctgtctcccaagtactgggattaaaggtgtatgccactgctgcctggttctatggcttgtggctagctctgaattctgaaccctaggcaagctttattaaatcataaataatatatcactacatcaaatagtattaaatgtgcttttataatatttctagatatttttactaacatagcaaactgagttcattacctcagcaagtatgtgttaacctaggagtggtgctgaactcttgtaatctccacactgtaaagggaactggaggattgtgagttcaaacccagaatgaactgtatagtaagttccaatccaccttgggctacacagtgagatcttgtctaaaaatcaaataaagaaatgttggcttggaatatttcttatcaatacagtgcttccctagcatgtgtgaggccatgggtttactccttaacattgctcccatgcctaaaaataaatgtccaagttgaaatacttgattatgatatacaacatttccattgtgaatgtaagtcaaacctcacaccccttcattattccagaatctaaaattcaaggattcaccagtgcagaaacagaagaacaaaatatcagcaatgtgataatgtataatgacaatgtataatgccaattatctgttttactgatgtataagaaaaggcaacaggagcactacttgtcttcataggctttactagacttaagagaaaaggaagagaaataactacatttttgaaacatatgaattaaatgtagagatgcttggtagacatccttgacttgaatatgttggtttattttctcaaacacaaggtttcttatataaggactactttttacaagccacaaaaatgctggagaatgctaatgccatttattgttatctttagttgacacatctttagaccagttgttggaataaaaataagatagacacgttggcctatttaatctgagaggcactgtacagataattgcttatgtctgtaaataaagaaagcagtgttattctccaagcagtattaaatagactagtagcaaatgaagactaagtgaaatgctattaatattctctggcttcactcatgcaaagggtgttgcactacaatgtaagcaatctcataaagtatgaactgtttttaacctgaaaaaataggtaaatgctaccaaggggctaataatgatgactttaaaaggccaatttatgctgatgttagaattcatgaagatatgagagtgagaacactaggaacatgaatggttttgttgccaagagatgactctttttcccttggcatttgatagttccaaattactcttttcctttgctttgttccttttaccacagaggctcaggggacccctgatgtaatcattaggaaagaatagggaaaatgtctacagagaaaagccaatctaggacttgcatgtggaaacagccagagagaaaggttcctctcttaatgcaatgcaataaattcttcttgtttattgaagatcacaagttgtcataggattcttcttagtagcatgccttttatataaacaactaaataatttttgttcaacaaaactaactgatgaaaattgtaagtcataactgaactgtggaggcaacttggagctcaattttactgtagaagaagtttagtatctctcttagtaacttttctgttgctgagataaaacaacatgaccaaagggaacttagggaacagaaaatttattttggtttatggttccagagggataagggtcgatgatgacagaaggaaggtgtggttacaaggggtgagcacgttgacagaaacaggagctcacatcttgaactataagtgaactataagtggtgtgaagcttttcatctctaagcccacccctgtaatggtaagtctttgcgccaagctgcccaagccccgctgccacgtgggcgcctgaaataacacacagagacttatattaggtacaatgctgctggccaatgactaggatttctcatctgctatctctgtcttaagtatcaaccgtaattattaatctatatatctataaagacttacagaggacaccggccttgtgtccagttgcctggtggtcacatggcaattcctccttactacattttccagaatcctccttgactcctagccctgcctatcttgctttccaattggccaacagtgcttgatttatcaaccaataagacaaacatatacacagaatgacctcccccatcacacccccagtgatgtacttccttcagcaagactgcaccacccaaacctccccaaacaccaccagcagctataaaccaagtttcaaatacacaagattatgggggaggtatttcttactcaaacaactatagcctttggtaactggccaaaagtaaagagtatacttcctctttcaaaaaaacaggaatattataataaaaatgtacattacttctcaatttcatcttattgccatgtcttaaaccacctttgagacccattgacactaatatcagacctaatttcccctgtgaaatgttgaattatgctcttaacttgtagtataacgtttatagcaatgtatagtctgagagttaggaaggaatgccaaagactaatcccttacttggcgtctactgattttaagcacaatacttctatggatccatctttcaagtcattgggatgaaaaacaagaaaacaaaaacaaaacagtggcgaaaatgacatatgaggctacaaatagaaaggactgaaaattgtctctgagatgacaggctgaaagtaactttacttagttattccataagttttaatgaatgtattcctgaatctaaaacattctggtagttgctgggtatcagatggtgagagaaacaggtgctcagcatctcttgtggctcttacattctcatgaagagataaagtcaagaaagagacaagtttgtaaatgaaaattttaatatatgacacaaaagcaaaaaggcaagttatgtatgatactggtataagtgtacagctttagacaatgttgtcagaaaagcctgcttggtgaaacactatttaagctaaaacccccaaaaaggagaaaagaaaggctgggcctatgagaagcaggggaggggcttcatgagtggtgtggagactgtgtggagttagagaagaaggaggtttactgagcatgtctcaagaattgaaagaagccaaactaaatctctccaatcgtagagtattcataaagtgatttcagacatgaggtggttgacctcttactacccaaacagatagcaattgcctacttccaaccctttcttcctttctatgtcctttgtgatattttttatggtataatgaatagttttctggagcaaccattagttaggtctatttggagaatttaaaaattaacaacaggaaaggaagcctaaggaaatggttgagacagtaaagcatcttccacacaacacgagagcctgagttagatctctagcacccacacgaaatctgggcactgtgcctttcctttgtaaccccagcactgtaagaggttctatgtgatagagacagacctgagagctggagctgattggacagtcaggctggtttggtgagagatcctgcctcaaaaaataaggtagaagacacccaacattgacttctgcctctttacataatacacatgtatattcacatacgtaatgaacttataaccaccataaacacacacacacacacacacacacacacacacacacacacacacacacacacacacacacatacacacacacacgggtcctaagtatattggttaaggtcctatcaaagacagaattcactctgtattttaaataaagatattttaagactcatcatttgaggtttacctaaaggagcaaaagtcaggaaaccaatcatcaaccttcagcctacctaaataaaaatcagtgactatagtttgttcgaaagatactgcaaatcatggtaaatctctcagcaactctttctgaagcacccattcaagggcatcttattaaacgtatgcttctgcttgcagtgacctcctggagaataatagtctcttctcttggcttccagaatctcatgctcttgctaacagacccaactgttttacaaaggagaattttaaagtgagaaagtcacaaggtcacaaagctgaggttctttcattacacagcaatagacaatatgataaataattttttgactgaagctcacattttacaacaagaggaccaagagaacaggcttctggtcagtaggattcactgagggtgatatattcctgtcatgtaaagaagcttgcttaataaaacagtgaacttactgatgactcagactgagtctgacagcacagtgtggcttgtggtggtacactccatgagaggcagataatccaaagcatcatccaacgcacaatgccatttttccataaccagactccaggtatccaaggaccaagaggggttgacttctttttactactactcctaaaggataacttacttttgccaacttggtaccattatcacatactcagcaccactgaaaaacatttctcacaggcctgtttacttaccaggaccaatcagagtggggcttaatcagggttctgcaattgcagtcagataacggctaggactgcagtcaactgaaggctcaactagtctggatgtccaagacagttactttactcaatcctgtgcctcggtattctctgtgtgagcccagattcttaaatagggagtcgcaactccatgtggagtcacaaaactgaatgtagggcctgttaaaaatttgtaaagagtagaaggtttctgaacatacaacaaccaaaaattaattcaaaatcaaatgtataatgaacccatggtgtttctggtggcactttgccatgctgtgttgtgtgatttcactcttgccttgtttgtgaacatataacacatgcatttctcagtgcacatgccatcccactatgcaacaacagtgtctgaaatgccccaattcagattccaggcaagtgtatgttaggaattgtggtatttgtactttacaaatgaacttttctgctcttatagaagcataatgattgcattgtggaaaacaaaggcttttaatacttccccaccattattcttcaacacacaccaacttagtatgtctttgtgttatattatgcaacaatgtttgattttaaaaattaatgttggaatttctgccttgaatttcattaaaaataaattggcaagtgaaatttggcttgtgattaggatagaatttctaaaaatttctgaaatgtttgtaaatatacttctgctgttttatactatatatttatgcaaagccaagttctcagcattgatgactataagatcaaaatactgatcagtcttgaaaaaatcttgttattctactattttcatatcaatatttagcaaatattttttaaaaaactattattatttgtagggtggtgtgtgtgtgtgtgtgtgtgtgtgtgtgtgtgtgtgtgtgtgtgtgtgccataacacatgtgtggagttcaggggataaattctggtagtggggtatcttcatccacccaaagctctggagattaaactcaggtcatcatatttgtacagcaagtgcctttacccactgagtcatgatgccagccctcagcataaaaaaataaatctcattagtatgtaaagttactttcatctttaagaaatgagattatatatatacatgtatatcaaattgttttaaaataagatttgatttgctatcaataaatgtctgctttttaaagatttatctttatttgtatgtgtatgagtgcatgctcatgtgtgcaggtgtgtgcacccttgtgcacatgtagaggccagaacagggtgttaggtgacctcttctttcatactgtacttactcctttgaggcagggtctcctagtgaaccctggactcacatcttggattgacaatccccagtgatctcctagtctccattctccttggagctgggatgacaagtatttgtgaggacacctgggtttttatgtgggtgctagaatctgaactctgctcatcatcacagagtaaagacttgtacttaactcatgagtcatgcctccagtctcaaatgttttattttttatctactttataatcacacaaaattttctaaggcaaaacggcattataagtggaagaagccccgctctaggactcttctggaaaagtatttgaagcatggtgacctcagaacatcatacatgggaactggctcccaagagaaaggaagtggaatctcaggccaggtaaggatatggctctaatttcacaatgtcaaaatggtcacagcacaacagtccctgaagctgttaaagagtcaaaggaatgaagaaagtctcactagagagtgtgaagatcatgtttgtaagaacaaatgttggatataaaacataattctgttgatctttagataaggtgatctcttcctagtgccagtggcatgccatgaggataagtaaggcatctcactaagagaaggagaaattgaagcaggaaaggtccaactgctgcttccatcttggaagatgctttgtagcaacacacagtccagaagcatgctggcaccccttggttactgctgctgagagcttgaccacctaccaggaactaactagaacactctgaggtggagtaaaacccatgattttgaagatgggtataatccctttggccactttcttcatgagcccgttgtatagttattattcatatggttctagtcatatttgtaacattttgttccccccccccccgattattgacaacgttttctgcagtggatgccctttggtcagcattcatataaactagccatcagaatctatgcatatccaaagatatttttcattttcttgtgacatagctacctttctattgctgtgataggacaacatgacccaggcaatttatagaagaaagagtttatctgggactacagtctcagagtctgtgactatcctggcaggaagcatggcggcaagaaagcagcatggtgctggagcagtagctgagagcttgcattctgatccacaagcacaagggagagaaggagggagagaggggaagggagatggagagagagaaagcatgtgaaagagagacagacagacagacagacagacagacagacacatacacacacagagagagagagagagacagacagacagacagacagagacagacagagacagagagacagagacagagacagagacaaagacagagactgggaatgacaagcatcttctgaaacatcgaagtccagccctagccctgtgacacacttcccacaaggccacatctcctaatcctttccagacagttacaccacgtggggaccaaatattcaaagcctatggggagcattcttattcaaaccatgatatctttctttcctaaacattatcaattcctaaattttactaattcctttataatctaccaacatctctggctaaattaaccaaatggtttgctgctatccatagaccagtgtaaatcacttttctgatcttgccttgttccgatctaagtgaacagctagacacaaaatccaatgttcacatggaaaacctcctttctacttgttctttaaagtcacaagcaggctaaaatgctttaacagggtatgaagaactattcaggaactagacatgctcagtcacatgtcttgtggaattctccatgccgttatggggaacaacacaagaaaaggaatagaacaggaaaaggcatgtcactgcagcagaggtaaatagtttggatgtctgagtcacttactcatgccatttgtgtcttgggaaactgcttgaactgatctgtatatcctgcctacagcactatcaccctgtcagacaagtaacatcttagatcacatggtcacttgatgtctcaggtcttcagtaacaaggacacagcaggagcaaggccagcactttccccaaaagaatacttatcaacagaagattgacttctccaaacttctgagggtattgtgctgtttttatttgctactgtgtgagccttctggcttgctgtttcaagagccatttggcatgctgaatcatatggaccagatcaacttgcacaaaggcttgcatctgcttcagagtctccaattgatctggaaaccattcaaaactataggttactcaataagtgactcaaagaactcaatgggagtatgcagcatccaaaatccaaatgggttcacatgtctcagtgacagagtccagaaaatgaagcaattgcccttcccctcagtagaaattctggggtgtgctttggaacattactaagctgtcaaggcactgcagcttgacagaaagaaagtttcaagagcctatctttcatcttctgtgacacatgtgttaaggcaagtgtactttctctttcctgtacacaaaatcaaaccccttaaaggaatgaaggcctaaactctctcattacattcacagaggcatctgtgtatataataagtagactaatgcagttgtctatgctggtctatacctctgcactaatataagttagaacactattagactgcgcaaagttatgttccctattctttgccgttcacgtagtatgctttcaattaacacttaaatggatgcatgactagattgaataatttatgaggaaacagtgtcgagcacaggacaactgacatgaagtatacatgtaataatacatagaggaaatctcctaggaacttagccagaagcctgatcacgaagacccccaatccacattttgtcagttgaatatttttttctaaaaggttatcagaaggcattgtacaggtttctgcttgttgttgaaatctacttactcctcaaggttgttctcatcactttatactttaccttggatatgcatgtatgtagacattcttaaatgtacgtatacatttacctccacatgcacactccaaatctttatcagatggtgagatgagagaacatttgatattctccccaggcatcgctcacagaacttgaatatagcaagaatttccatgtttgtcaaataaacaagtaatggctcaactaaaatgccacctttagcctgaagccttcttggatcaccccagctaggagtgatctttgaacttcactgtactcagtaaggctttggcactcttcacatgcagtcatattttacagttatttgtttatgtaactattttttgctgagttaaggaggggttgtcaaattcatttcaatatcacaaaaacagtgtaatttcttaaatgaggagactatcaagtgtatatctattaaaaacaaaaatgattattcttttattgttaaatgttgtgggtgtcaaaataagaagagaaccgtaattataaatatctattattcattagttataaatatatattaagttcattgcaacccattatttgttgaaaactgcacagagcatgcgaactatactagaaagaattatcaataatcatctgccttttaaaataatcttgagataatcacaaccaaaaattttaccattttaaagtatataacttagtgttgttttttttttctgtattcatggggtacactgtgtagtagccatcatcatctaagtccagacccttccccaaccacattgcctgtggctttggtgtttgctctgtttctttaagtcgatttgtttgcttgtttgttttttgttttccttttagcatggtttataattttatgttgagaactgagtgtggtatatggcatacagcataattttttcctcacacttctggaagccttgaagtcaagctttcttgtttgtaggcagccgcctacttactgtgccctcagttggagtttcctctgtgtttacacacattcccagtatccatgtgtctgaatttcttcctcacatgagagcatcattcatattggcttagagttgatgcagtaccattattttaacttactgttttaaaggccctatctccaagacagtaaagttctgattgactgagagttggggtttcaacataagaaatgtttgtggggatgaatataatccaaatcacactgcatatcaactgtcttctttaaattttgttagttatcacccagaatgtaaatacattcatctacagctaaccaaatttcactcccaaatcacactatccagctcaagggtagtctaaatgcctcagagcaacaatattctaccttctccctccagtgtcttggaatattgctactagtcatttctcttacccatgaatgataattatcaagtacaacaatgacattattgttttgaatatacttttctttcagataagaaaatgatgcattttaatattgtattttgttttctctaagacccatcctttgcttatacaaacccaagttctcagtctgtgattttactgcccctgaagaactttgaaagtgacaaattgcccaaattttcatttgtctgaaaaagtatctttttctaaaggaccattcctctgatactgagttccaagctgctgagtttgtaatcatcactgttaactatcttgtcttcctgtggcattacttcccaagagcagtgtgacaagcttctaatcctcccacctcttacaagtgaggcaatctactcaccttcgttcaagatgttttgttgcttattttctatagtttgattaggaaataaggtgtgtgtgtgtgtgtgtgtgtgtgtgtgtgtgtgtgtatcatcatacttggggttcactccttggttctgtagtctgtctcacataatatattctgattacagtttccctccctctatccctctcagtggaatgtcattatgagtcattttattgctacttgatttttttaaaacagtatttggttttatctatgttcctgggataactagtttctgattcttggtcactcaagcagtgtgtggtatggattccatctcctgaggtgggcctcaagtcaaataagatactgtttttttttttttaacaagttttgggcaaccattaccctagcatatcttgcagactgcacaccattttaaataaagggtttgtgaccatgttagtatttatgttgctctttttggtagcatgcagagacctctctctagtaaagatgctaaaatgtaggtgtgaaggctctatgtaggcaccagctcaactcctctaagttcaatgagttgtgtgcatattgtcttcagcagtgaggcctagctgtcagtttgtggagagcaactcatagtcatgacaacagcctgggttatttaggggtttccatgggacccctttaaccaaccaataactcagttatatataacccaatcctggtactggaagcttcatttggtgacaagaaatgtcctgctggggctctggctcccccattatttggcaatttcagttatgttgccttcataggtttctgtgctgcccctcaaatggcctttctttttagtggtctctctccccatattccctcctgagtcctccttgcccttcctcagccccacttgatcctcccgtactagtgtctaccctcatccatccataactattatttcccttttgtaggaagatatacccatcccccccccagtcccttactctacacctcatctctgtggttaatggattgtaattggttatcactgattcaacagctaatatccacatataagcatatataccatccttatctttctgggtctgggatacctcatgcagggtgcttttgctttgttttaaattattacatccattaacctaaaaatttcattttttaacagcgggggaaaaaacattccattgtataaatgtaccacatttctttattcattcttctgttgaggacatctaagttgattccaatttcttgctattatgtttattttatgtgcattggcgttttgcctgcatgcatgtctgcatgaagatgttggatccctcacacaggaactggagacacagaaagttgtgagctgccatatgggtgctgaagcaggttctctggaagagaagccagtgctcttaaccactgagccatctctccagtgcgccaatttctagctattatgaatagagcagcaatgaatatggttgagcaaatatctccatggtagaccgaagtgttttttggatatatgcccaagtgtggtatagctacatctcagggtttattgattcccatcttcctaaggaaccaccactgatttccatagtagctgtacaactttgcactgccagcagttatggttgaatactcgttccaatttctccacattctctccagcatgagctatcacttgttttattgatcttaaccattctgacaggtataagatgaaatctcaaagtagttttgatttgcatttccctaatggcttagtgtattgaacatttaagcttttctcagccatctgagttttctttttttgagattttctgtttggacatatatcccattttaaattgggttatttggtttcttgataactaatctatatattttggatattagccctctatctaatgcatagttggaaaaatcttttcatgttctgtagactgccaaaatgacaaggaaatatattttctgaagaccaaagaaaagtcaggagatagattaaaggaaattagttctacgtcattgattcatctaatcattcattcacccagtttgcagtttaatctgtttgtgtgtgaggatttatgtatgtgtacgtgtttgtgtctgtttctgtgttcatgagtgtgcaggcatgcatacttacgtgtgtgcgcacgtgcgcaggtggaggcaagaggttgatgtttcgtgccttccttgactgtgccctgcctgagtttttaaatgttatgtgtttttgttttgtgtacatgtgtacctccttgtctgtatgtgcatcacatatgtacatgtgccagcagtgaccagaagagggtgttgggtcctctggagctggagttagagatgtctgcaagtccccatttgaatgctgggaaccaaacttgcttcctctgaaagagcagtacacactcttaatcggtgagctattgttttcaatccctccacattactttttgagctctcactgaacttagagctgaatggttggctaaattgactggccagcaagctccaaaaatctcccaatttctgcctctccagtactgggattagagcacatgctgcctcttctgccttttagcatgggtgttggagggtcggaactcagatcctcatgctcgtacatcaagcattttaccagctgagccatctctcccacatctttaatgttcaatttgtgtgattgtctagtttgtcttgtttttccaagtgccagtttatgtatgaattatatcctttgagcatttttcagcagtgacaatttcaccacactggtaatgaaccaggaattaataattcagcctttcgttgttcatttccaggtcttaataaaaatcaattggaagaaaagtcatatcaaagccttcaatgagattctcagcttttgaaaagaattagatacagaattgctaaaaatattgtttactattactacatttttcttttgaaggagaattgtccatgaggtcatgaaaatccatcaaaaaacaaaaatgtatagacatgaacaatttttgtaggttacatatcatttgttacagccagggaaaagggaataaatggttacatgttttaactctttaccattcaaatgacaagcttagaactaaagatacagctcagtgttttcttacaacacacaaggccccagggtcaatcccaagtaccaaaaatgagaaagaagaaagaggggaaaaaacatcagtttacaggaaggaaacagggaccaccacagatggctttattttacccctgaacatggttctttttgccatctggagtcacgagtgaacagtggctcattcttcagtctggacgagtccttcagaaaaggaagtcttaacagaaataacatgcattaataacaaatagaaacatggatcactcagatcactcaaatattttgacttgcattcttggctcaaattgttgaaatgggagagcttttttatctataaatattcctgtctgctgtggccagaaaaggtgacttaattttctagtgtgttgcagtttgcagaggagcagttgtacaaataaatgtaagggtatcttgctttaggtcacagccttaggtaaagccaggtgccatgccactcagttatcatattgaactgtgtctcaacccatatcaggagaaaactgagacaactcgtaatgaattcttttgtagtaattactagtaatctctctctctctctctctctctctctctctctctctctctctctctctctgctctctcgtccgtgtgtgtgtgtggtgtggtgtgttgtgtgtgtgtgtgtgtgtgtgtgtgtgtgtgtgtgtagcaggctttattttttaaattattcacactaggcaaatatgaggtgttccatgttgctgagtggctgattgcggttagtatccctaaggtcttatggaagcctctatgtttgctgttctacagaacgagggctctggagccagatgtcttggctacaaataagggttctacaattctgtgatctcttctaaaaactgcctcagtttcttcttgtataaaataaatgtactattttgaggctttattatgcttattaactaagataatactaggaatacttccaacaatacctggtttaatatatgctaattatttgtcatataatatgaaattaaaagatacaaaaaacactgtcccatggatatttattattataaataaaatagatttcatttaaaattacttagattttagggaatactgaactttattgatggtattcaaaaaagtagggctccctaacccgctatcattcttctggaggtctgggatggaaactgtgaggggagcttctcagtgttgggggttgagttgggacagggactgctcagcagccaaagacctctctctcttcctctcctgttcttgtgtgtgggggtgtggtccaggccttcttacttcttggaggctgtgtaggttatgaatgctaccacaccattgctatagctgtagctgtatttgttgtcataccaggaaatgatattaataaagtttgaaagcccaaagcctgccccagtgacacacttcctccaaccaggccacaccttttaatctttcacaagaagttccaccaacctgggaccaagtattgaaacatatgaacctctgggggctattctcattcaaacctttctacgtttagctaagagaaccagtctctgggggtgggggcagatatttcagattaacttagatataaatcactttgaatacactttccctcccattgaattcataaactacaaccgtgacagttaagtaggtgtattctactttaattgttatgaaagccctaaaatctgacttccccaccagtacgtattttaagaaagaacaatgaatactattttctctcttctgccctcccatagttgttaattttctggtagtatctgtgtttcctgaaactgcagctgcttaaaactaggatcaccctgacctggcccagagcaatagaaggttaataaaatgaagcgaatccttggtactgtttcctgcagctttcccccttgactcattggctctcttggacttcttctgggctggagaattctcgaacaagttgggatggacatctggatttggtggctgtttctgtgactgtgctgtctgggagtgatgatggcatcacttaggtggcatggaccaatattaaagggatcttactgacatggcaaaacactggccgaagtcattgttgctcaggatgatttcaatggagcgctgagccaatttctatttggcatttgagaagctttcattagttaaatgttaaatgctaaaatacccatatagaaattctatatttacctgaaattgagtttgaaattcttttggggaattttagtgggtatttataacagatttcagaggatgcgatagtaaccaaaacatgtcaccaaaacctaaaacataaaaatatttataggacatctatctatttatacctttcatgttaataaaatccaaaatattaacaaataaaataagggaaagatgtgagaatacacatgacatataatcagaattcttagtatatgaacagtctatatttcaataaacaaattataaaccacccagtaaaagaccaatgaatattgttgtttgaagggagacattttcaaagagtaaaatgaattacttagttattacagtgagaatgattgacaaggaaaggaaaatatagctgggaaatagatcaagaaaagaagaaactgcacaatacatccaatggggttaaaacattgacatccattgttggtgacatcaattgtatttcaagttaatgatatcataattaaaaacccacaattgagcaaatcaaacaccaacaagcactacacacacaacttgtttccctcaaaagacaagactggggcatagactataacacaacaccagaagagaaggatcttgacttattatagaacttaagaaactccttgttgaagtgtagttttcttgactctcttgataatgaagcttgattctggcaataattaatgctctgtgagtctgttacctcacctgttctgggtgtggtcagtatgcttggaggaaacttgtggacctgacaggtgttgtgtaacttttttagggagatgttttgtgtcaatactgttccaggtgttctaagaggagctggagacacaacggagtcagtgaaaagtaagtcttaaatgtgataatttttatagaagaagatgataaagaggtagggaaaaaagataaacttacctttctgacagagttaaaaatagtgttgtgtgatggagataagaggttggtgaatagggacaacctgaaacagggcagtcaagggtgagcttctgcaagtaaaatgtgatagatcagaaatgtccatacagaaagtctgggggtatagctcagtggtagagcatttgactgcagaaagtgaggggctgcatggccaaggaagcacaccccaaaaccctggcacactaaaactaaaaattctaaagatcccagggtactctacaagcagaaatgatacaaatgtgtggtgatagaatggagagaaacaataaaaggtgttggggaaaatacatggactaattaatatataaggcaaggtagccatacaaagacttagacttctatttcaagatccacaagaaaccgttgaattattttatgctgagatatatttgatgtggctatctttctctggcttctgtacgaaaaataaatagtattaaaagcaggaaaaataatttagagtggagtgtcgaatggaagatgccaaaatggaagtaattggagaaaaatgaaccaaataaagatatactgttgaagaaaggatgaatagggttttgtttgtttttgtaactgacagtatattggtggtatggtgatgaaggaaatattcaaaaatgtgaaaatagccatcttttattgcagaatattaactatagctagtgtgttgtaagtatgctgacttattcctcatatttgaaattttatatcatttgagaaacatttccccaactctctatccatactgtataccgtggtaaccacacttcacctttgtttctgctaattttacctttgaagataacacatatggtatatgtaactatggagctgggggactttattaatctgttttctgttgctgtaacaaagtgccagaaactgggtactttataaataaaaaacacttgtttaactcgaaatcctggggccccaagaacagggtgcctacatctctgcttagctctagtgagaataaatcttccagctagaccacagcatagtagatgtgagtaaaaggaaagtcacgtggcaaggtgagaagccggacggtttgggggccaggcttgttctatttatgtagctcatttttacaggaattagttcacactgtgagatcagcattagtgtttctcacagttgcaacctcttgcctctcttggatttgatttcatctcttaaggattccaatgcttatcaatattagcatactagtggcacatggacctttgggggaacctctcaagccatactgtcagtataacaaggaaaggtctagcagaatcatgataccttcttctcccacaggacatctgttactatacatagtttttcttaatggaacttttaaatgatcatgtttattgttttcattgtcaccagagttttcttgatgggtcttcttgttccagtcctctgtgtgttctgaagagacagcatcagtcttatcctttctacgacagggatgatggacaccacaggtccttggggtgcttcttggtaaaatgtgtatgtgaaaactatttcttttataaaatctccagtgtgttattacacaagcacacagaggtgcacacacacacacacacacacacacacacacagagagagagaggagagagagagagagagagagagagagagagagagagaggcagagacagagatggaatagttgataagagggaggaaagaaagaaagaaagccagacctaaaaggtagtatggaaagaacatcttgaatgtgatacccataataaagagaagatggggcagttggaaaagttagacattgcaagaggaaatacaaatctttatggactttctgaagagctacttggtatagagagcaaacacatgaatgcatgcccaactttttttcacttttttttattttattagttcaaattaggaacaagcttgcttcacatgtcaatcccttctccctctccctctcctccccccaacatcccacctgcccctagccaaccccccttcactccccaggcagagtaaggccctcaaaaggggcatgcccaacttttaagccacaaattttttacattttatatagaattataaatttagtcattgtacatgcatgcaaagatttaaatacatgaaagataagacaacatttttataatgatgatgaataggaaacaataatcacctaccaatgtgggatactttatagaccactcagtaaaatgttctcctgtcattaactatcataatgtagaatgtttcatgacataaaaatgtcaacactgctggagatgtgacttgcttagtgtggatgagaacctggcttccatcccccatgctacataaaaccaggtgtggaacacatgcttgtaattacatcactgggaaatggaagtaggagaatcaaaagtcagatgcatgacaagttttaactcagcctggatacatgagaccttatctcaagttaatgttgtagatcaagtaaacttacaaatactttatgattgttgattaagtaacaatacaaaatagtaggttttattaataatgttggcattatggtcctctttctattgtccatcctttttctttctcctttctttcttcctatgtaaaatatttaaaaactaagaaaagtaagtttctactgttgatggtagattccaccaggtcttctatggcaggtgatgacacacatatgagcaagcctaatactaaataaggaattggccatgtagagaaagtagacattaatatttagcaaataactgctttctaacatttattctaaatgtgtttacatacttagatcacaaatgattataaatagggatttgggctgcactgaggtcccttctagagacaaaaacaactctgctcgttgctcaggcagagtgagagatgcctgaggggttcccttgagcctatgtggatgttgtctgcattagtacagagcacccagaaactagaggtcgtgaaaagcctccctgcaaagcaaaggtgatgacttcagttttctaaccaggtgtctttagaagctgaaagcttgtgtgatgggggaagtgcttctgtgtatgtgtttgtcttattggatgataaataaagtactgtttgaccagtgaggcagcaagttaggtggggctaggagtcaacgaggattctgagaaatgtagtaaagaagtggtgatccacacaggaagtgacatagcaggcagactcatatataagcaaggacaagaaggaagtcattccttttctctctctcttcctcctggtctctgagcagagtcaccatgtgagccggggaagacaggatgcttgtcgctggtgtccaataagataagtcttataaaatacatagatttatgataattaagactgaactaggagatgagaaatcctagtcattggccaagcagcatttgtacctaatataagtctctgtatattatttggggccctaactcgacaggcgaactcaggtggcgggcaaaaggctcccacgtagcagcagggctcaggtggcttcagcagaaagacttattgtaacacttgtatttaaggatggatgtgtatatgtgacatacttaggaaacctgtgaggtgcatcattgcatactcattttctgcctcctggcctttcttttgctgcctctcttctctgaatggtacctggccccaagaattctagaaaaaaaatgaacctgttaaaagttaccacatggagagaagacaaaaatatctctatacatctacctccccagggctaggggaggtagatagctttttttggtaactgcttgccatgcaaacataaggacctgagttcgatttccagtacccacattaaaaaaatctgttgctggggagacagagacacgtggatctctaggtttttgcctgtcagccaatctagactgcatgataagttccaagttaatgagagaccttgctctcacccaaaggtggacaatgcattgcccttggccctatacttgcacctgcaagtagacacacacacacacacacacacacacacacacacacacacacacacacacagagagagagagagagagagagagagagagagagagagagacagagagacagagagacagagagacagagagacagagagagagaaagagaacctacttatccaatcagagaaatgcattatatgcagttcattacagtcatgtcaacatttgtctttgtctttgtaaatgccaactgatgggatgagcagacacatgcaccttgggtagatcaatcatggttgaattatctaaagtttctaaagaaatcagcacacttataatatatcccagagaacagcaaatccattcccaaaagatagagatttgatcttctgaaattcttaccacaaagttcatattgacagtggacatggatgagtaaatatttcaatcagtctttctggaggcattatccctagatttacatactaatactggatgaattctctaagatgattaatcttaatttctgcccagctcctcactgaagccaggagcccctcattatattcagctttgtatgctagaactaagcaaagatcagcaaaatgaatgtatacaaaagttatttatgctgaattttctgtagtgagagttagccaccatcacttgcattggggcagaaattcaaagtcaagcataaaattgggaaaatagaagtttaaagtatcccctgactggggacagttagcatagaatgctacaggcaggttgggacaaaattagcgaacctgtcatttaatgaagtcctgaccatatgttgtcagttattacgtgggacattgtgtggcttctgagatggtcactagaggtatgcagtattacagtatgcagattctgtaagtctgacttataataggctgccttttcccagaccaatagattctctgattgttgcagattgtgggccagagttctgctgttatatgtggtctgaccactgttcatttgcacacccagtgtctcaatacagcaatatggctgcctgtaaacccaggcctgggcagttccatccattgcccttgatcttccagaatgcttcgaatatattcttaaagtgagaccagtagagctagaataggtgtttcctcaaagcccctgagaatcacatgatcaaatcttatgtcttctgtaaactttcctaaaattggagaaatagactgagccagaaatgcaaaagaaacaagtggccactgttatttctacaatccccccttcatgaccatcctattttatttgtaaactttaatctttgagacttctctcactgtgtccaggtttaggattgtgtcatccaaataaagctattaatgctgctgcaatgatgaattgggcaacttgctgaagggcttgatgatgtaattttctactggtaaaatgcccttggataggacaccatgtgcagagctcagatgtaagtctggagattgtggaagtgctgttacattctgggcgtgggagtttagatttgagggatgctcaagtcccttgaaggaaaacgaaccagtcattctccctttgggtttgttataacaggaagagattgtcaatactgaattgattttcacacatagtttgaaagcatcccactttgatggctctcagcaactttctcttgaataataaataaggaaattttggcagttccgtcttcccattcaggtagaaacacatcttcttgcattaccagaggccatttcttttctctctgagatgcctgagatattctatgaattccatgtctcaaataatttcagatgggaacgaagacaaactagttttatctcagtctaatcagttaagtgtctgtgatgatatgtcttcttctcaggcctgccatcttccataatgtcaaggataacatttcactcttgatggataatagggaactgcaggctgaagataatgttcaaacaacttcacaagacctatgaaggaaacaaaaatatgatgtatatttccattgatgacagtggagaatgggcatgtcccacagacgaggctgaaatgagaagacagcaaagaaacactataagaggagaaaaataatttcattatataaaatatcaatttcaataaccaagatagagtttcatttccttttataaaaagaaaatattcattacattctttctgtgaatgaaccacattctatataaatctggaaggctaagtctaaaatggtaagccaaaagtttgaaatgatgtctgcctataatcccagcactggggatactgaggcggaaggattgagaactagtgaccatcctagtcttcaaggcatgaccttgtctcaaaaagcaaacaatctcatgaacaccaagaacaaaagataagcaaaagatactccccaaaccagagtagatattgcaatgttaatgtaaaacaagaaaattcagggtcaaaagaattaaaaaggaacataggatataatttaaaatcagaagatctcctggcagagagaataaaggacagggactcactcacatggtaggagaaagtaagttcttctggccctgttctattatgtcagtcacaaaaagctcgcctgctaacatattcctctttccagttatgatttctgttcattgggcgtggcttctacactggaagatgcaatttgtcatctttagggattgcttttcttaaatgatatgtctaaaaatgtcacttctattgctgcaaaacacattaccacagatgcagggacctttacaagaacatttactaatttcaaagttttgtaagctagaagtctggcctggcttgtatgagttttccggttaaggtcgaataagtctccaatcaatgtgtcagctgaatggccttctaatctgaatgctgctggtggtggggggatcaagggtagtggtggaattcagttccttgcatttgtaggacagtcacttcattgttctgctatcagtcagctttctggacccttccttcagacttttcataaccctttctttcatcttcagcgccggctacagcacctcaaactcttcctccattttcttctgccacagccaggggaactgtcttcatgataagactcgggtttctacataatctcttttttgatgaacgccaagtcaagcaattggtgctcttaattacgtcagaaaaatcttctttgtcatattcccttgcattcgggcaggagatctagaagtggctctgtagactttttggatcctctcagctctgtcagtcagaggctgaaatagagaaactggtcctccaaacatcaggcctgggattcatgtgtgtttgagtcagagatttccctggaattccgagttgcataccgcgttgcatgcatcaaagaatacctctgtttaacctaaggagtttgactcagcactctgttgttatcaagaaagtacctgcccagtcactaccctcagtagaactttatctagaaatcattagtgtttcttggagaattcctagacctaacattaaagccattgtggtggggtaggggtaggagctttaatttcctttggggctttttctttctcaacacgggtcaagaagctttcctgcttgtacctgagcccttcaaccccaaagggcaacaccgaggcagcttcaggcttaaatgtacacttgtcctcctaaacaacaaggaaccacctggactgtcagtcccttacccagcatcccctgtgagcatctgtggatggggcttgttgggaaaaggaaaaatgccagccttcaccagtagcaaaaggacactcagttcctctccccgcacacctactgagcttcttgctcaaggggaaaggagagtcctttatccggattgaagagcaggaagaacaaagaagcctcagcaatgtctcctgaatttcctggacttctctcttcctaagagcctttaacacagttaaatcgcctcatccctgctactggcaaacggcaagcttccagaaatcaaagccacactagggaaagaaaggagaaacggacagctctttagaacgcgggtgacagcggatatttagtctttaaataattaaggatatagcatttgtacgatattaaggaaggctctaatctacatttatgttagagcatgtcattactattccacaaaattaaatttttatcatgatagctatggacttttctgccaagaaattttacttattggctagattagatattaaaataagggaaatgatgaattatggaatacttgatgttgaatatttaataagtcaatcccatgttgctagtggaagtttcggaaagaatgcctgttgcatcctaacactgaatcaatactagttaatgacaatggcctgggggcaagtagatgcctaactggttcacagtccaatttagaagcacagcggaagcacactcagatttaaaatcattcaacagtagaactgttggtaatttcccagaagttagaggaaaggaaagaagatcgatgcctttgtcagctgattccttcaatagttcctgggctgtaaatattggctctagcttataggacctttgtttataggtccagctatttttctttcacatttttatattactttgaatggtaccagttttctcctcctcctcttcttcctctttctcctcttcctcatgctgagaaatgattctgactccccaaattagtgtaatgggaagaataagaggggaagaaagcagagcgactgcagaggggggaaataaatgaagggatgaagaaaacaaggaacagagcattgcaaagtgagaaacaaaaggaggaaaagtcaagaaaggatgagggggggaggagacgagaggggttgaagagatggagaggatcagaatgaacaagaatatattattttgggataacaggtgggctccaacatttttatatctgataaagtatgcatgcattagtgtgtggttcatgatgggaggtccttgactttgaagaacagcaatagaaatgctattcaatacttgattaagctgtcaatgcttagttcatcaattacgatgtaagtacagttttagaatatatttaaactggattgacatagagatgaattaacatacaagtgaattttcagccatcctaatgtcttgtctcttagcttgatagaaaattggtagggactggagagacggctcagcacttaagaacacaggctgcgtttccagagagcccagattaagtacccagcacccactactcacaagtatctgtaactccaattcctgggaatctgataccttcatacaacacacatgtaggcgaagcaccaaatgcacataaaataaaaataaaacattaaaaacttaaaaaagaaatgtgggcaattagagaggtgaggagagatttggcaaagaaattcgattttaatgaggggggagtgcatagcactgctggcctgggtgggtccagagacagggcttctctgggaactgagcacaagcacctgggatagctaggatgggaatgcaaggatgagaaggtggacctcttttccacgtatatgtcattaactggtgtgaaaaaaacactcttaattttaggtagggccattctctttcctctctctctctctctctctctctctctctctctctctctctctctcacacacacacacacacacacacagaggcacgcatgcaagcacacttttcatgactgtataaaacccagagggtaacctcatgcatgaattctttgctctctaggattatggatgtgatatgagcagctcccctaagcttctgctgctgtgacaaccctgttatgataactgtaacctggagctgtgagcataggtaaactaagtggcttctgtcagggtgttttattatagcaatggggggacaggagccaagacacatctaattggttttttccttggtttaagttggctgtcccactcaattcttcctgaaagacttttcaggtgtctgatgtaactaagagatttaggactggggtgtagctcaggagtagagggcttacgagggactaatgtaaacagaaggcattgcttgaagctgcactttgctggcgtggtgatgtttgaggtaaactggagaaactagagtgctttgatgatctgtgacttcacatttgtaaaccatcaagtttattttcagtcggaaagaattctgtatgagttcaagaccaaaccaccatcaatgatgacaccaaaaacagttttgtgattaggagtgttaagttgtctactaaatatgattaaaagtcatcttgtggaattggtctccacggtgccattttatgatccttcatgagaagagacacttttcagaactggcattaatgtgccttctcttttgagccttttgtaagacatgctggggaaagggaaaaagaaaaacatgataagacatttatcagaaagacctatggtttgaaatttttttttgaaaatagtgtatttagggaactacacaaatgtgatcaatgtgtttttacatgcaataaaggcaaatcccagtagcaataatgatagcagtagttgaaattgagggctgaatacctgtaaagaccaacaaagtattgttctgtcctatcttgtggataagtcaagaaatcacaaattctacgtaatgtgctggtgtaaataaggagagtgtaatatagctggatatgatgacatatctcagcacaagatgtaggaagacatttagtagacacaggacaataaggcttaggagggttaatataaacaagaaaaaatatggagctggaaagataactcagagggcaagagtatatactgtctgcaataactccagctcctgtggatctgatggctccggctccttgaacacctgaagtcgtgtgcacatacatccccaaggccacacacacctatagttaaaaactaaaataaatctttatttaaaagataatataataaaaagcatattcactaactcaaatgggcagtcagcttggcttaaagaactcctaaataaaaactgcatttgtcttgcttaacatttctatgctatacaccttccaaatctccaccaggagtcaccaggcttcccttctcaacacctgtccaatccctgcagccatccactgcagagacagcatggttcccggtatcttccatctttgagtcaaattgtctgcagatacttgtcatgctggctgcgtgcatatgatattaccactatttgaagcataagtagaataaacacaaaactatggtaataatgagatgtggtgctttgaataagaatggccctcataagcttatatatgtggacacttagtcaccagcaagcagcactacttgagaaggattaggagatgtagccttgttgggagtaggtgtgaccttgttagaggaagtgtgtgattggagatgagctttgaggttttaaaagcccatgcctgaccctgatctcactctgtttgcctcagttacttctctcaagccatgtctgcctgcatgccaccatggctccctccgtgatgataatggactaacctctgaaactgtacacaagtccccagtaaaatgctttcttttataagacgagttgtcttggtcatggtgtctcttcacagtcatagaacagtgactaagatgtcagggtgttctgtgttgggggagtcagttgaagaaacaaaagtaactccaagatgaatttttacgcctgtgtggcagcaggaagttccagcctttgatggactgaaccttgaatatctggacaaaggcatatttattgatttgttatacaaacttgttttgggggtaaagtatttccttataccaaggtccctagtctatatgtctatatgtctatatgtctctctaaagggaaatgtcacatgctcctgctcctttcatccttatagtgtaccatttcagtacacaataatccaagagctccaggtatgccagaagtgtcttgagaccatgcaaagctctcttgaggtcatgcaaaggctttaacgccccctcagaaaaaaacaattctacaaatcacggaaaatgttttctacaatgatcaaggtcattttacttctaagaaacaactattcactctaatgatttcccttagatacagtgactctgctagattcctacaacactaagacataaaggggattaagctcccctctaccacagcatcataattctctgccttgattggacagaattaattggatatgtggtgctcaccaacactttttaagttcacttctatctctctttctatcaaaaaggaaaggatgacacagcagcattcagcactctgtgggcacttagctcacaactggagagtatgtatttgatttcaggtagaatgggttgccatggctgtgcacaaaataaggaccttagcctacccctggtgcccacattatgacagatggccacaggaaagcagttggaagatgtggtgtaatcaactttgtgaaatcggatccagaactcaatatagacatcaatacaacacatttttaataaatgaatctgtttgtagtatgaattatttctttatattttcattattagtttttgtgtgagtgtgattcttttctaaaaatggtctcatttcaatttttttccagattgtattttgaatctggaaccaaattagttctactattcttattgcttgatatgaattttaagcccgtttaaaaatatttatttagttagttattagatggagcctctctatgtatcctaggttagtctcaaactcagtcttcccacctcagcctcctgaacgctagggaagtctatcatgcctcaccaggcaggagatctttcagcaccttctggggtctgtggaattccgagtaaaaggtagtcaaatcatattcatttatgcatttgacactgggaagacacaaataaaatgaaaagaatgaatttgttggttctctgggagttgaattccgggtcctaaactgcctagaactagtttagcctccatattccgaaaggactaagacccttctctgctcctccccttccccacactcacactgcacagttccatccctgagccttttgtcataggaggaaagcagtgctcagcatctgggcttggaaccgagccttcggctgctcaactggttcatcccacttggtgaatggctctactgtttggcaggcaatggagccatacagggagatcatattccaggactggggttttcttttgctctcttttagtcaaacttaattatgagcagaggtgggcagtcaaaacagctgctgctgctatttcaccttaactgattctctgcgctacctactcttacctccctttgcttaggttagggtagcgagccagtgcaacttcaaaaccttagcacgcagccctccttccaaagtctgtgcaaactgtcactctcactgcatcctgggaaatgtagtttaattaattcagaagatgggcaatcaagttaggaaggctggaaaaatccccccttccccccacacactgactccgccttctctattggctcctcccaggttgcttaggagacacgagacgcagaatcttggtccttgttacgcagagctgtggactggtgctgagggaagtccaacccagtctgttctcaactcaagcgcaggcatggggactttttctagcgcgtgtcaggactgtttcggcaggaaagagcagtggtatgagattggacccacggacttgctggagcgcaagggctccctaacgctccgctctcatgacaagaaatactcgaagccagtgttggtgtattcctggtgagccaaacactcgccgccattcatgggttctagctagggagggaggagaggagaaggatctggcaggaggcaggaaaagtaacagtaataggaaacagtggtggagaagagaaattgggaagaggagaaaatcaaagaaaaggattgattgtgaagagaaaagtgtcacagagaagaggggaaacagaccttccacagagcagtgaccatatcaaagtaggctagaactctacaggactgctctcagcacacctggacctgccccagccagtgctctggcaagggagtttagttgtctacacaaggcaaaggagtgggaatcatttaacaggtttgaaaatcgcccccttgacacaatgcttacttgtaaacagaagtcctgttagaaagccaggcccactggcaagaggcaaaggtccttgtacagtgccagcactgccagtgcttggggagggggacacaattgagagcaagaccctcagcatccttcagactattattcatgaagacccttccagccacaggtagcaaagtttagtctctccttgcataaggccagtgcagtttgtttggtgtagatgctgcttattttttttaattacttggtcacacttaaaattcacataaaaatccagggttgtgtgttctcttggaaaattgtaaggtctggaggacttccttctaaattcattgttttctgatgatggagctctcaagactccaggaagcatttggccttcttcctagctttggaaattatgcctagaattctctctctctctctctctctctctctctctctctctctctctctctctctcccctccctccctccctccccctctccctctccctccctccctccctctccctctctctctctctctctctctcctctctctctctctctaaagtgtccaatagctacagtgtctctggcaaaaagtggttacttttttgggggtggggtgggaatttaaatgtaattgactcgcacaagggtgtggcattattaggaagtatggctttgttggagtaggtatggtcttgttggaggaagtgtattactttgggggaaggctttgggtttcttttgcttaagattcactcagtgtgacactgagttaacttcctgttgcctgcaagatacaatactttcagcgatctcttcagcccatgtctccctgcacatcaccatgtcccacaatgatgataatcaactaaacctttgaactataagccagacatcccaaatatatgttttcctctataagagttgttacggtcattgcttcctttcacagcaattgaaccctaactaagatgggggcaggtggtcaagtttcttacaataattattctgagaatatttgtaaaatatgggcgaagtgagaagacagaaatggaagtcacaaattttgtctacttgatgattttgcctttgatgagagatgaatgatttcgactttgggtatggttggacgcagccactcctgcattgtttgtgccatttctgttctgcagacgtttaaaagcctgtctactccccatatttccaaagcccactctttccgcctttatatctcatttcaaattgcattctctgcctacgctaaactcactgtgagacattatataggcacaaaatccaaagctacccagggaaacattctttttcaacaataaagtttattatggaaacatttcttcagattggtggtatatttgcttatggcaggggtggagtcctaagtaccatcatttgtcttcatacatatcttatttcatgacccttaagaaagacatttagctcttccatggacttgttatgccccaagaatgtgcatcataactgacattgcctctgtaagttatggatgagaaagggttctgatgggacagacttctgctcctgtttgcattactgttgctttgaagttagcttgtaagcagcatggatagcaatagcagagcagaaatgttaaaggtatggggagaaagaaggcggggctgtaagtcatcagccattcctgaacatgtgtagggctttcctttggttcccaagggagaaaaattaaattcaacttagcaagtatttatgtgtcagctgggcgttggtggtgcaggtctttaatcccagcacttgggaggcagaggcaggcagatctctgtgagttcgaggccagcctggtctccagagcgagtgccaggataggctccaaagcttcacagagaaaccctgtctcgaaaaaccaaaaagaaaaaaaaaagtatttgtgtcataaacattgctacacattaggatgcagaaagagaaagataatttttgtaaagtattttgtcttccttcgggtttctgttactatgaggaaaaaacatgaccaaagaacttgagaggaaagattttatttcaatcactaataaagaaaatgccctacaggcttgtgtacagcctgatcttatggaatgtttttttttttttcaattgaggctccttcctctctgatgacaatgccttctatcattgacctaaaactcgccagtacacacttatgtctagaacagaaaaagtggtcaataatacacgatagtcaacatcatgcagtataacacaagaaaaaaaattgatgaacttaggctctagattttaatgacagccccatggctatgtgatgtgacaagtgacttagtgccaggaccagagccattatagaatagtagatttacaattattgtatgagcatagcaggtaacacaccccttgacattaagcctggtgtgtagctaggtcaaaaattatttatatgtatttagacattgttagtgttttcaaggaatttcacaggcaagcacattcacctacttggtgatgattatttgcaatcagaataattactagagacaccccccccccaattatgttcacacatgcagggaggcaaaatggttcattttttttcaatgtgcatgttcacaattaaggtcaaataaggcaaaactctgccttcttttttttctcttttcttgtgttgtgtttcatgctaccttctctctcttttgaatttgtgtgggttttgtcgatggtgttattgctagtacgccaacagacaccaggatgaagtgtgcctggtgtctctgagcacaagaagattgtgtgtgatgtatcttttgaagaaaacgtgtgttagacaagttttgtttgtgtgagctctagtgttgtcagagacaagttcagtattgaagaagcacccttatatcaaataagatgtctttaaacaggtggacaaagggcctggggatgtaatttagtagtagagtgtttgttttgtaagtggaggccctagattccatccctgaagtcacaagaaaactaacaggagtgcctataaaacaaggctgtatattgtggctaggaggtcacaggaacctgaaccagtttcctctgtgatagatgctcatgaattgtttgagatctcgatagaacactcaccaatgagaatctactctaaagatttagaaacagtggcatctcctgaaactggccacatcctgctgtcttttcacaaaaccaacctgtcatttaatatctatgctggcaagtcagcataaagttgagtgtaaacttattattgaacaatgtcagcaaccccatgattgttagctatttattgccttattttatgacacatatgaacttttctgaaattatagttagtagtggtttttaaattcaattgttaaacatctaagggagtactccatcagggagcttttatacttgcaggtacaaatgaagtatgtaactaggagacattctgatttacacttcattgttgcttaaacatgtggattttccctgcatctttttatctggcatgtaatagaagtctgtttgacctcactgaacatattcaaagtagttgtgtatggcagacatgatcaaggatgggagttgatggatacctctagtccttgagctagattggtaatagaacccatcacccttgtcacagccagctggttttgagttagaaataacttctctagatgtcatctttgcttactcctttctatagcatttatggaaccaattataagatgtttccattagaaattgcgagatgagagaaaactacctcctgggatatcttcccactcactggaaaaatgaaaaaaaaagaacaaattctacttacttcatgtgagatgagtttgttcaatcatatttactcattcactcctcattcattcattcattcattcattttcttctgttcgttggtcaaactgacaagtggtaacaaatgataataatttaaagggaaaaaaatcatccagatctccatggagacagatcctgctgcagtctccatggcaatatctagttttaaggactcagattaattttatgcatttgtaattttaattgttttttctttcttgtctaagtcgcaaattaaagaccttgagggtttcacattccccatgctgccccctccctcacaataagaagaaaatgaaaatgacagagaaggaggggaagtcagatgtaatccttgtggggacaggggaatctccttgttttaaagatttttacaaaagctaatttgggcatagataataaattagaagtaacaggaaaatgaatctctctctgacacgcttagatgttggtaccactgtttctggagcaggagtaaatgtgtatatacgcagcccctccctgaagatggagagccattccaaagtaccaggccatgtttgtgtacttaaatagaaaacagaatgcctggattccttaatttaatgcgtaattctttttgtgtttaatcagtggtttttttttttttttttttttttgagtgctgaaccagaaggattttagagtcctcacatcattgagggccaaactagagtcatgtaaagctctactggccaacagaacccccaccctcaccccgtgcatctccattacacaagaggataaaaagacaaagaccaagagcccccctcccccaaccatgtgctgtagcttgtatgtcactgaaattcatcaggacagcctcttctgtcatgcctgtaactttggcatagacccagtatttcaagagaaagcttattaaccctttactgcagatttgagatctagttcaacaggataaaagtgaaatatgttggtcactttccgtgtaagtgaatttggaggaacacaacacaccagacatttgtgacagttaatcatctactaatgattagctctagaatcagctatggagcatgctctagctgggcatgtctgccagggctttttcagagaggggaaggatagggtgggggagtggatggaccctgactttgagccataccattccataaactggatacaggactaaataaaaaggaagtgagcaaaatgctggtattccttcctttgtcttctgattgttgcactatgaatagctgtcccagctcttattgccatgccttccctaccctgctgggacatatcttttcatggtagatgcccaaatagttgcttcctgttttacgttgcttttgtccagtctttggtcacatagaagaataatgcagtggaagagaatttaaaaaacaggggctgaacctgtgccagtctcttggttgcaatacctgatacaccctcaggaactggtggatcctaaggagattttcagttaaaatagggacaagtacttacactgtaaagaactatttttatttcttataaatgttcaaattaaaatatcacatgtgcatttattataatgtaaagtagattgaggacatggaaatatattcactatctagtgagtaacaaaattcaaatttgcatactggtgggtatggtgatacatgcctgcaatcctagcacctggcactatgaggcaggaagattatgagttcttggtctctctgggatacatatagagacaactgttacaaacaagaaagttaaactttgtatagaatccagatgcacataataaaatttattttctacaattgatcctcagctgttgacttctacagaaaaaaatgaacatgccagttaaagcccatctctacctttctaactttaaatggcttattttaggctaaaatagtcaatttcagaacagtgcccattctttccaggtcctttctcctccacattctcctcttcctgttccatttgtatgtatcaagggaggagagttatgtgacagatggtggtggaggggggtttgccttccagaactgtgtagacatccttgtccttgtactcctcattcttgctccactcctatgcatgctgctggtgaacttaaaattttttgaagacttggtccgtctgcttgcagttatagtcccacccttggctcttgctggttctgcagatacctgtgtcaggttcattctttctggctcctgaattggacctaaaactccatagccactggtgggctactttgtccctcaacatggtcactgacagcttagatcccatctaagtgcactgactatgctctactgtgctagcttttctcatcatggtcactatatatgcaacaggagcaaattaagaagggagggaagtatttatattggtccatggttcagaatgcacagtttgccatgatggcaaaggcatagtggctgcagattcaaacctgaggcacggctttcttacatttgaggaagcccgcccaccacacctatgatggtctactttctctagctttgcctcacctaaagttcccacaacttcctacaacttctccagcagccagagaccacctggtcaaaaacacaagtgtgtgggagacatttcacattcaagctctaacacctgatttgcccaggctagcttcctcctgttggcctacatatagcaaagcctctcaaccaatttctatggtgttcctctttggaaggccaattttaaggtcactccacttgggaacctctggcttaagaaattaatttctagatgggcgttggtggtgcacgcctttaatcccagcactcgggaggcagaggcaggcagatctctgtgagtccgaggccagcctggtccccagagcgagtgccaggataggctccaaagctacacagagaaaccctgtctcgaaaaaagaaaagaaattagtttgtagttctcaacaatgctgacttttaagtgtctcactcaggactcaaagcagagtagaagttattttaaaggcaactcagcaatgagtgaagattagttcccggccaaacgaggtcctcataagaaagtttgaaaaggataatgtttggatggaactgtataagttatcccgctatgtgacataagtcagactcaaaagctgtggaatgttttttaaatagtaaaaaaggaattgaaaacagaatggagagatatttggaaataagcagagatcgatgggaaaggaaggaatgtccagagaaagagatgggcacaaggtgaccaaagtgggtgacatggatgaaaatgtcatgataaaaatccattgttttgtacaaccaatgtatactaattaaacaaacaaaatggtcatgctttagagcctttcctctgtttaaaatatacatgaatcttcatcagaagaatattagttataagctacagcaaaatatgtattacagactgtttggcctcttctctctctctgctacgtctacatttcccagaaatgctatgtattgttttcatagtgagacttgagtaagagtccttttaaaattgacaacgttttctagagctttccctgtgaagcacacattctctaagtgatcagaatgtaggcataatactttacctttttcagactccgactcactctaaaagacttgttatgaatctttaaaaatatctttttaattgctagtttttgctgggtaagaatcatgatacacattcctttggttttgccacccttccgttcttgtctgtgtgctgctacggtagctcccacgccacagttattttaaatctagtctacgtgtttgcactccccaatatactcatgctgtctccagttgctttttgaatgaaatagtctttgggtgcaaagtgctgtttttctttccttttcaattgaaattcaagaagttcttccttcttcatccgccctggctcctatctcctctccccagtgctggtctcttttatgaaattccaatcaaatattttcttgagtgattacagaattgcgatggtgccacctgcgtgaaagtgtggtagctggcatttatgaaagcacaacagttttgtaggaaagattgttagggcttgaatatgtagttgtctgtcccagccttcaggatcctggtttaaacacttctccatagcacatggtgctgtttggggacgtttctggcatcccaggtgaggcttacctggaggaagtaggacctgatgactgacccttgtccctgccccttcctgtctccctctttgtttcctgtccacaatgaggtgaagaagtccctttgcacacagttcttcctgcaacagtgtcttgccccagcacttgggtcaagcaaccacagatgggagcctctggaactgagcaaaatacatactctgtcctccttgagttgttcatgtcaatgattctgctacaggggaaaaaacaaagcaaaacaaaaaacatcaaaacaacaaaaccaaaaaccaaaccaaaacaaaacagtggcaaacccttgaaaggcagaatacaggcattttgccatgtggatacacttgaaattagaacaatctctctgtatagagagacccctgcctccagctaactccttactctcatgatatcctagttgagctgattctgggatccatgaggtcccctcatcatcatcatgctgatgtaatctttaagtccgatttcaccaagctttgctgccttttacactgataatctccttctaggtgagggtattggggcaaaggaaagggtgaggagaatgtggagcctagtaatagtttgatacagtgaagttaaggctatgggcacacacgaaagtccaggcttaggcttttgggacagtctcaccttggagctctgtctgccctaaaacacactctgcagaccatgctgaacttggagaaatctgcctgcctctgcctccagagtgctgagactgaaggcatgtaccaccactccaggctcagacatttttttctttaaacagtgctagaactagtattaagcaagtatgtctgcaactccttggtatcatttcacatgctcaccagttgtaaggccagtcagatctcttttggttctaactggcaaatagcttgcactggcttaagcaaggcgaatggataaacccaagtatagttggtttaggatcttaggaacacaggggtaagggacaccagctcctacctcatttctctactcttgatacctgttatttatcttctcatggaagactacgggaagcatgactgtagaaattgataatttacacctctgtctccaaaagaaagtttggctttaaggtattttcagctccaaaattaaagatctgaagtcagttgtttgtccctggatcaagtgtctgcttagggtcatctttctaagaaaaatcaaattgtaacctggtgcctctccagtcgccatggagacatgtacacaggagaaagaagatatgatggacttgagatcccagtgacagctcctgtgccagaggaggactcggtattccatgcattcagttttatagaaatgtttagaacaaaacacaataatatattagatgtaatgagcagaaaaagaaatcttgtacatagattagggtaaaaacatttttctggtgctttgaaaatgttatgaataaatttgaatattgtgatatgcttttgatagacactaatcttcctttgttctgttccttttaattcattttgaaatacaattatgccttaattgttattagtcacactttatgttttctttttctgatttgagctttggtgaattaacaaagataactgattggcaggaatacaatatgcttctttggtaaattattaaatccctaattagactgctaaacttttgataaaatggaagaattaatatcctatttatctctaaataaattttagtataaataatttagtttccttacatagaaaatattgggaagattattttgaaattaaaatgtaatggggaataacatcacaattttttcacaacaaactaggtgtagtggtgcaagccagggatcctagcattctgaatcaggaggcctgaaaggtcagggccagcctggcctacaaagtaagacctctgaagtaagcaaacacataaaacccaccctggaatataacaaactctcacctccctcaacaaaaacaaagcaaaagaccatgaccaaggcaagtaaaaatgacttttaaacatttaagaaaactccaaaatgctcacccagaagcaagaagtgttaaatgaacttaaaaaaatcaaacttttcccccaatatgttctccttagatgaagcactcttttgtgggtgctatttatttaaaatatatttactagggttgaggctataacttcttaatagagggtttcctatcatgtacagagcccaggattggatttgtagcactgaaaaaaaaaggtcaaaatatatttgttgccacgtgtgtcaaaggcaaactgctggtttaggacctcacactgaccatcgtccctgtccttaggatgccagggactatgaggtggggagggataatttaacaattgcagtgcctacagcatgtgcaatagttaaggctaaaataagcagggtgtcctggttattaggcatggatcagagtccagacgccacccactgagttttctaggttctgtgactcagaactgtgagtcagatcagagacacacagatactgatagaaatagacagttaaggaaaggaaatgttctcttgaggagccaaatgatttctcacgctttgcaggttatttccatagtgcctgtgttgtgtttgtatgctgggggctttttgtgcttcatactctgttatatggtccaggtagagaagaatttctttcacatgttagtctcactacctcttaccccatttgcctgctctgctgtcacactgggagcatctagaaggagcatgtatcttaggcctgacagataagataaagctacacagtagagccctagcccctaccatccatagaagaactaatgtatggtttgttagttctcaactttagggcggtattgtttcttcctcaaacatttggaaataggtgcaggtatttttgttgtgttatgactgccatcttgtgttgtgcatgattgtaagactgaggactcttggtcctagggatgactgtggcattgatatttactcatctatatgatgtctcatattcttggacctacaaccggatgagtggaaacagtatagctagtgtgcacctggagtcatcacattgaggttaactagtttttatatggacattcacacaatgataatagtggcattgctagtcaatctagtaattcattcactcctggccaggcagtttgcctctccttgttgtgtaagaatctttcacttttagaactccatggtccctggcctccttgtaggaatacatgtcataaacagccaatgggccattgcaggctttcctctagggggtaaaattctgaggccttacaccaagaccccaagaaagatgttgaattatttaaaaattgggggggggagctaatgaatggggaggataagcagtcagaggtgatttttgtcatgcttgacaacctgaactcagtcccaggaacctgtgtgtgctagagtgtgacaactgattcttcaaggttgccctctgcccataggcatgtgcactatggcacgtatgtatgcgtgcaataagtaaaataaatgtatacataattaattaggggctgaatagatgactcagtgttatgagtgcttgctgcataattgggagaagcagaatttggatcccagcactcacatgaaaagctgggcatcctgtgcaagcctgcacctgatctttgagtggggtggagatgggcggatctcttccagtctagctgacaaaacagtagtcctggctttagggagagatcctgcctcaaaggaaaaggtagaaaatgatagaggaagacgtgaaatggtctcttctggcctctgtgcacatgcctagctgcacagctgaatacccaagtgtgtatcacacacacacacacacacacacacacacacacacacacacacacacacacacacacacacgcacacacacaaataaacattaaaagaaaagaattgcctggtaggtgtagttggtagagtgattgcctgacatgcacaaaaccctgggtttgatactcatgctagaactctgggggtgagtaaggaaagtttaaggtgattctccgttgcatagggagtttgagcagtcctggccttgcttgcctgaatccaaaaatcaggcgtctacgtagatggctcagcctttgcttctagacattccccagcccttaaccccaagctaagtgaacactaagctttttcctgtttatatggttgtcttcacaccatagaaatggaactgcagagctgatggatttttgtgatttgatatgtttccaaggtttatttctgcttgataatattctatagtatgggtactgtatcattctggttccaatctccttgtttctcttcgactcattggatagcaaacctgtattttatttactaatttatttcttggttctgctgttcttccattttttaattgatgttttattttgaaatttttggtgatactaacatgcacttaaagctttgacattttctctgggtactgccttatgtagatcatatgcagtcttgagagttttttcattgtttgattttttttaggtaaggtctcatgtagctcacacaatctttgagcttactatgtagacaaggagaatcttgaatttctgaccctactgtctctacctccccagtgcttggatggtaaaggtgcaccactacacttggctaatgagtgatgagttttgttgttgttgttttggtttggtttttttgtttgttttactgttttcatttccaaagcatttggcaatttaagcttgtattgctctttgacttaaatggtttgataaattgtttatacccagatctttcaaaaattagttaattttgttttatcatctgtgacttgatacctatagaatataacatagtttttaaaagaatgaaatatagctttttaactgttagtcatatgtacttggaattaaagctctctaggaaggtaatcagggagtgtttcagttttttgctcatgcgcaacggaaggttacccacttgaccaaggaagggacccaagttctaattgtagataacatgtgtccaatctaattgttatacactagattctctcctaattctagctgtaattagttctatacccagagagcaaatatctgatagccttgaactgtggttagttctaaacccagagaacaaatgtctgagggcctcgagctgtggttagttctaaacccagagagcaaatatctgatagtctgactgttgtaaccagtcatttctcttttcttccttgatacaaggccacccagttaatttctaaaactcatctcattctattttgaaaatggcagaaatggctggctgtaaattcataaacagaacctccacctttctgcttccctttctggtctcatggacacatggtttgacttccttcttcctgtgacaattgaatagctgaccctccttccttgtcttcttttccttgtcaatgctgtgtgctttatgtgctttagatttttgtaacactatgtgtctctccaattctgcttcagattcttttgttagtttaagttgggattaatatttgataactagcacctcccatctatgtgacttataaacatttatttcatgctccccctaataacctctctaagtttttgctgggatgggagtgaattactgcttcctctgaggcctgttccttactggggtttaaagtcttctccaagtggagtggatgggggtaggatagggggtgttggggggggagggaggacaggagggagagggaagtgggattggtatgtaaaataagattgtttttaatttaaataattaattttaaaaagggttatccataagtgcttatattaaagaaaaatctcacataaaaaaacaaataaaagtctcctccaaactgcatgttgaaatttaagtgctacaaaatggcaatgggaagtgggccatttatgaggtcaggaggtgcctgattgaacagattgatattatcttgacagtggctctgttataatgtgaacattcgcctcccccttttcagactcctctctctctctccctcaccccactcctgccatgtgatgccctcctcatgttacgacataacaagaaatccttcaccttcagcttcccgagacttttccatgagaaatttctcttcttaagttattcagttggagatattctgttacagcaccaatgagcatgttccacagtcctctagaaaagcatctctctgtgtgacaggaggagagctggatttgaaccatggcttccttctactgtcttagcccccaggccatgtaattttggtacatagtgttttcattggccagatggagtcaaacactaccactaagtgcagagtcttggatgttcctttagtctgtttatttttatcatgtattaggcataataatgggattcattgtggcactttcatagatatgtgtaatgtatttctaccatgtccacctcctactgccctctcctgtcccatccccgactcctgtggatttgctcccttctcccacctagcccctcctccactttcaagtctttatttcttattttgattttgatgacccagcgagtttccttagggttgcttactgggtcctggtcgaaagattatttacatgagcattaagtgaccgctgacattcagggaggggtggagcctcttaagcccccctcccccaccatgatcttggctttaggtcctgggaatggggagctcaaggaccttcctctctgctgtgagggagggatgtttacaggtccagccgtgtacaggtctgtgtacagctgttgtggagtcagaagtgtatcagtcatgttacattccagacagcgcccagcctggcctccctccactccttcctctggcatttacattctttccatttctatcttctgtgatattctctgacccttggatacagagaatatcagatccagaaatcccattcatggctgagcattcagcagtcctagattctcaccctctaaccagttagatgtctgcaagtcacccctgcaggccttggggtcctggaaagaaggaaaattgtactggtgagaacaatgtctgtcacagatagaagactgtcttgtaaagctcccataggtggactctgggataggcttgtgtccctacaacatcggtgtccttgagctacttgccctatcatccgtgctgaagagcagtgctggaaaacactctgaggtagggcttgactctaaggttcttctagtgtgtgagacaaactttacatgtcttgggttttccagtgtttacagtgaaagagtccatgggcacaactgtgtgaagtgtgatttggttcagtcagtgctctgcaggttcccacctatgagccacctcatcactgagaccttgtctcagtcagggttactattgctgtgatgaaacatcatgacggaaagaaggttaaggaggaaaagggtttatttggcttaggcttccacattgtagtccatcattgaagggagtgaagacaggaactcagagaaggaacccagaagacaggagctgatgcagtaagctatagagggtgcttcttgctatcttgttccccatggcttgctcaatgtgctttttcatagaacccagaaccaccggttcagcgacggccccaccgacaacatactaggccctcccacagctatcactaattaagaaaatgtcctatagacttgccagtagcttgatcttctggaagcaatttctcagttgagactccctcctcttagatgactatggcttatgttatattgacataaaagtagccaagacagacctctttcacatgacctctgctctgcccatctcctacttggttttcactgggtcttgactccttttaagtagcccatggtatgatctggggcttatagttccttcttctgccaagattttagtttctcttttaagtcccccccctttttttctgtttttgaatgctttctcataagtaaatggaaaaatgtacattctttagctattcttatgatgaaactgttttaagtctagatcctatttacaaagaaaatctcatttgttttggttttgagtttctattatgttgaagaatctaactgactctccagggtaattttcttttaaagccttggatagcagaggattagaaataaaatgaattgcattgaaaccaaataaccttatctattcaatgtgtgtaacacatggaatcacagaaatacaaactgaaatggacattagactctcttactatggccatctgatattttctagaatgatagtgagattagagaggagggagcttgcataaggaagcggatgctgtttgcttgtttatagcatgaggggcaactgatttccatgccacttaatactctccagagcagtggctctcaaccttcctaatgccgtggccctttaagacagtttctcatgttgtggtgacatccagtcataaagttatttttgttgctacttcataactgcaattttgctactgttaggaatcataatataaatagctgaaaatgcaggatataaaacctccacacacaaaggagtaacgacccacaggttgagaaccactgatttaggtgccctttgcactacagtgaactgtaattaacatataattcatctttaaaatcttgagtccctttcttcctccacccagaatacctcttttagtttagttttgtttttgagtcatggtctctcattatgtagccagaactggccttgaattcataaacctcccgatttccccctttcagatgctgggattacagcccttaactatcacaccaggcttggagtgttttggttaactaatacaagcctttctttggagaggactgtcccagaatccttgagaagtataattgaatgtgaagataattgagggctagctgtcttggtttgagcaggatggatgtcattacttctgctggacatcctatcatgaaatgtatcccaggtggtgtaatcagttgtactgtcaccttccctgatatgtgtttcttcagctctctgtaagtcgtgtgtttggcagtcaatcagactgacatttccttaaccgtttacgtctccgactgctgtattcatttctttcctcacaatattccctatgggatttcttgtttttgaagactttctatgcaggaaatttatagtagtgataattcttgatttgcatgccactcaatatgtgttgagtgaagaaaataaggcacatccatcaggtggttttctctagagcacagctttaggttgcaggttttaggatcatggtgcagatgtacaaatgacatacaacataggatacattgaaaaacaaaatccctgttccctattctaagatgtcatgattccgctcaagaacataaaggtttcttacaatgccacaaatatatctaaacatccttgtcggtttaatatataaatcaccaaataacactagcttgcttatacatctctttgcctatgaaatctgcaaagggattgtcaagtctctttgcagcatttgcttctattggttttgagtttcaaatgcgtcagggaatattgctgactctccagggtaactttcctttaaagtcttaggtagctgaggattatgaaacttaatagaaaagatatcactcttatttgcactccatttacatcagaaaaatacaatagctgacagcatcgctgcaagctacattaataattctaaagcttaaagttaatgtattctgccatctggagtcttaactaaacatttttaacatttttaacatctttgaaatctgcaaagaaaatgtgtctcttgtcaagtaaccagagactggaatcgggctcagaatttcattgttctcatgtcagatactcctcatatccaaaattctttgcaattggtgttatgcatatgtatagtaagagtgtttgcatttagcaggtagatttataattcctctggagacaagctggtgttgcagagagcaaacttctctgtatgtatgatcactctctcctgaagggtgtctttgcagatggagccaggatactctttatctttatggacacatttgaaaggctttgtgttcagcatttataagggggtgacagtaacaaaatttaggaagattcaacccatccatcaatcatgaaagatctaatcctttgtaacctgttagactatgcaagccaccagacaaaaagatgaatcaaaaataatctctatgtctaagaagccctcagtctcaggagagctggatacatcaatgatacattagtggatcattataggacagtgtgaaatgtggtaccatgagaaaaaagtttctttgcaaacttccagttcctccctactccttatagacacaagaccacagaaaccctagagtttaacctgtcccctttgctatgagagaaaccctctgccctaactccacctttcttccactagcaggaattggggttcccctatggtgagacagccagaagggaactgtggcttcctgcatcacctaaagctctgggatagtttggtgagccttaaaagtacatggagtattgttcaggtttgcttaagaggggcttgcagatccttaggatgtagaatcagatagtggtcacaagggagtcctcaagctcccatagatccccaagtagcaactctatcagatccttttgatgagatagtgaattgcagccagagtcagactcaagatgcagaaggatgctggagggctggagggcacgggtgattgttggtaactagatgaatcttcagggcgtcatccagcatgggatctgctttgctggcctttgctctgagccctcgatcactgacaacagttgtcaggctgctttttatatagcttgccatttggattctctcccagcagccctctttccattcctaattctatttataatgttaagatacgaaattacatcaaaatcggtttaagaatcatattggctttccatataattctacaactaggcagtatctcattttaggaaacagagtgttcggctgatcctagctcttggctctgtggggaagaaagagttgagaaaacagaaacagaataaaagattattggccagttggattacatagcatttggcacagcagttccattctcctttgggctggtctcctagagtgttgtgcagaaagctagtccaaaacagtggcctcctgtaaactttgatggttgtcatacaccctgtcatgtggcttctcttataaaatggcagagccagaaacacgtcatctactactgattatattttagatagattctttacatttatttattacccagtcatttatttagtgtgcatgtgtgagtattgcatgcgtgtaggtacacatgtgctgtgccgtgtatggaagtcagaggcaattgaagagagtcatttctcagcttccatcacgtgggctttagggattgaactcagctagtctggtttggcacaggtgcccttcatggccctcacataggattgctgtcttagggttactatttatgtggtgaaacaccaaagatatttgggtaggaaagggtttatttggcttatacttccacaaccctgttcatcactgaaggaagtcagggcaagaaactcaaacagggcaggaacctgaaggcaggagctgatgcagaggccattgggggggggtgctacttactggattgctcagcctgctttcttgtagaaccctggaccaccagccctgggatagcacaacctgcaatgggctgagccctccccatcaatcaccaattaagaaaatatcctacaggcttagccacagcccatcttatggaggcattttctcaactgaggtccctcctctaaaatgacttcagtttgtgtcaagttgacataaaactatccttacaacttcttataaatagccataatgtatatattgtggtttccatttttaatggggtttctgtgtgtttgaatatgtatctatgtgacaatatgtgtttcttttaattctctttggtttttttcttctgtttgttttgtgtgatttgttagttttgatttgctagttttgtttctttttattgttatttttacatgcctgttttctaatgagagagagagaaagaggaggagagagagagagagagagagagagagagagagagagagaggataaaggagagaggagagaggaccagaaggttgtggatttggatgagaggggaggcagagaggacttgagggaggagaaacaggagtcagaatatattgtatggaaaaaaatctttttaaaataaaagacaaataggaaaaaatagtcatagctaccagacttgcttggcagaacaaggtctcttagaaggaacaagatcattttaaacatttttgtattgatttgttaggaatttcacatcatgaccccaatcctactcattttccagtccctacatgtctttacttcactcttataacctcccccccaaagaaaataataataaacaaaacaagaaaacactttgcttctccctctttcctgcctctccatcacatactgatttgtcgtagcaggccttgggagctgggtgtgccaccaagtacaccctcctgtccaaatagctctacttgcaaatgttcattacaatgagtgttggtcaggttcaaggcctctggcttctggtacaccatgaacactgggcctttactgaaacttctcttagatgtccttctgttgagtcatggagatactgaggctatggatctactggaccagacccgccctttcatgagcttagcagacactagggtagatgttggggtggaccaactcaaagccctgggtatggtcctgggtggtaactgagttggttagtcccagcctctaccatgaccacactcctcaggtgagagttgaagccagctattctgtatactcattattggggccagctctttctccatgctcatggtgaggggtgcagacagttcccccattgtggcagctggtgaggggtggggcagttctcccatgcccaggccactagggccagctctccattgatgggtagggccatttatctcagggcaggagagggaaggggccatctcagcacagccctcagacatcaacatggcttgggaggagcagtctagacccagggcatccacatggccccccttgttgataatatgggccacggacattgtcattgtcacagaccctggctatagtagggccatgaatccagacgtagccctccgctgaagcttaggtctggaaatcaccatggccatgccactcagattagtatggccccagcagcagcatggcccttggacatcagcatatgctcattccttttaaattaaatttcattgtgtactttcgttgcacatgatactgagtttcaagaggacatttccatacaaacaggaagtacttaagtgtattctccccaattcacccttatcttcctctttgtccacccatcctctttgtcccctttgttcctctagacagcttgcttctatgattatatatatctatccatgtagaccctaggtataaaaaaatgagagaaaacatgtttgtctattaagatttgtttcatttgattaatatgagttactccagttgtctgcatcttcctatggtttagcttcgtttcctatggctgacatccgttcctctgtgactggacacccgagctggttccatgacttaactattgtgaaaggtgctacagtgaacactggtgtgcacatagtgagtccagggtatacccaggagtgataggactagatcatatggccgttctttccaaagtttttgacaatgtctgctctggcttccatagtcactggactagctaacactctgcagcaggcttccttgttgctcacatctttgctagcatttgcggttatggctctcattttactcagatgagatggaatgcctgtgcagttctaatttgtatttctatggtgtctggccaaattgaatggctacttctttgtgagtttcttgaccatttgttttcatcctttgagaacttcccatttcattgttttgttgtttgagttcctgtttagatttttgaattctttgtgtatgccaggtaatattactcctttgtcagatgaatacatgttaaagctattttcccattctttacttgatgaactatttccaattgacaaatgagaatggaacctttataaattaaaaagctccagtcttgtttcttaagtaactaggaccctaatgataaagcccttgactatccctatcccacaaagggttttctctaatagttacagagttttacgtgttatattggggtctcttatatttggaattgatttttgtgctgggtgagaaatagggatcaaatttctttgtagtagatacccagtttttctagcatcatttattgaaatgattctttcttccccaaatatgggtttttttgccattttttttttatcaaaaatcaggtgcttggagttgtgtgggtttatctgtgacgtcctatatgcctgcttttgtgccagcaccatgctaacttttgctactatgaccctatattacaacttgaaatcacatatggcaatgcttgtagcattacccctttgctgagaataactttgactacacagagtctcttgtgtttatgtgacttttaatgacatatgttacattatacttagaattttcaactaattcaatgttgaacaaaaccaaattactctgttgcttttctgttctgtgagtatttttatacttttatataaaatcttcataacaacctagtgaactaagctgaaaaattcttatttgttaaatttgagcttaaaaacaatgtggatctaagtattcaaaaaatcttctgattttagagccaggacatctcccaggtgtggaacactttccattatctcaaggtagtctagtccatgaattaagctgtgttgcccttaattcacagcatcagcttacttttttattaactacaagatggaccaatgttttgtagagtttatacatttgaagcaaagtggatgaggttttggtaatgctccaatagtttctgaaatgttcttaagaatttaatatttacactgtgaatcagttttatctaaaaggaattttaatatcttttgttaattaaatttgttctttaacattttcatacatgtatatagtacaatctaatactacccctgctggggctcggcttgtatcagtcccatgtcacaaaggctatctattccagactgacgtctttggggctgcggtcggagccagctgaatggccctaggtccatccctgagtcggggagtgctgagctgggaaatcctacctacccaatggcgataaagatgagacatagacatcttgtcatttcaggagggctctcagtccatactggagtctggagttcccagtttattcaaacgtcttcttaaatagctttccaacagtgggggtaaccacagaagacatctactatcatgtataaagctgatatcaaataattcttttaatcctagagaccctaaacagtccctaggcatcaagccctcagaacaggtgcaggtgtacccagggcctaggtttgttgttatgcaaactaggagacattctccactgtggccaagccatccagctaatagctggtatctgaaagactatgtgggattcgagctcctgggatagagtttgaggcctgtatctgaaataccataattgatgttttttgggccctgacaattccctcctcttaaattatgaaaaagaaacccgtgcttctgcaacaggacagatgactgtgcctggcttaggctgctttctttaacctgtcagagttacctgtcattgaatcacgcattctgccatgttctgtcttaggtttcctggaggcaagaaaacctttccgatctctggctaaaaccagcctctgtaacaaagaacactaaggggaaaggggcatggttccatgtcatatgcttccaaacctgggagattatcaggaatcaacatctatgctctcatggctataaacaacctcttacaaaaagggagcagaatgaacacagttaaaatgacctattaaaactggtgtggaaatgtcttgagtgcctcttgttatattaaaacctaaatctgtctttctaaaccatttttaccctaagacttgtaagctacaacattacattccagttagaatgaactctgatctcttgtatgcataaacatttgcatagcacatacagcaaaggttacaaacattaacaattttagtatgaacatacattagggtgagttacaatgcaatcaaaagacaataaaatgttctcatggtgtgtggagtatgaacaattctacaattataaactttttcactttttcctgtctagagttcaatgccctgtgagctttcttttttcttttctaaagttcaatgctctgctggctgtaaaattctgaaatcaggtttgcagtatctgtcctagaatgttaactctttgtccatgccccattcaaacattgagaaggggcttttgccactcatcacggtccatactagtttccaattgtttaaaatgggtcctttttccccaatgggaaaaactggcaaaacagttctatgtcttaagttgtgacaaagcacaagctgttagttgtccaataatttgtcggctccaggttgagaattcacgggtctgggaaatccatacagctgacctgtcgagaaacttgaacttgaactctggaacccattgcttcctttcttcgatggactgtagattcaatgacatcaagggtcaggagcactggttcattgtgtctactcgatggcttgggcaggttcccacggttttaggtttggttttcctcttcacgcatctaaccaaatggtctggcagccatctcgctttattttatttttttttctgtaagaaaacaaacatttcctccatcccaattgggtcttttccactgtctagtgtatgggtgtctccatctacctgagcaaaagtctctcagattccctcatgacagaatctgtctgtagtagattgctcactggcatccatatttaaaaatttaaaatgaagagtgtgtgatttaatgcatcatgtgaggactggggacatagctcccccctttttatcttttgaagttgtgtttttttaacttttttttctatttatgcattttttcttttttgttctttaattacaactcataattacatatccatcccccctccagattcccttgtcctcccatcctcccatgttcccctcaacccctcacaacccactcccaactcctccccagggatagcgaggccctccaccagggaccttcaaagtctgtcatatcatttgggggaggccctagatcctccttactgtatctgggctacaatagaatccctccatagggaatgggctcccaaaatccatttgtgctctagggataaagactgtctccactgttagagttcccatagactgtcttggcctccaagctggctcccacattcagagggcttggtttggtccaatgctgtttcccccgctttatgactagggtctccatgctatcagtaggtcaggtccactgtttcagcaggtctctccagccccatcttggctcatttgttcatccctcctccctctccacaactgaattccagtaaagtggttcagtgcttaactgtgggtgtctgtttctgcctcgaacagcaacaggacgaagactctccttcctctccctgcccccaggctcccactttggtcagggtcttgtccccattcccttcatcgggggactatgcaatcttctcttggggtcctctttgtttcctggctcctctggtagtgtagattgtagactagtgatcctttgttctatgtctaaaaaatcaaaattgattgagtacataccatgtttatcattttgtgattgggttaccttaatcaggatggtttcttctagttccatccatttgcctgcgaatttcaagattccattttttttcctactgagtaatactccattatgtaaatataccacattttctctatccattcttcagttgaggggcatctaggttgctttcaggttcttgctattacaaataatgctactatgaacatagttgaacatgtccttattgtatgagtgtgcatactttgggtatatgcccaagagagggattgctggatcttgaggtagactgattcccattttcctgagaaatcaccatactgatttccaacgtggttgtataagtttgcactcccaccagcaagaggagagttcctctttctctacatctcctccagcatagattgtcattggtgttattaattttgggcattctgacaggagtaagatggtatctcagagttattttgagttgcatttccctgatggctaaagatgttgagcactttctcaagtgtctttcagccaatttggattcctctgttgagaattctctatttagttctgcactccattttttaattgcattttttggtgttttggtggctagcttcttgagttcattgtatattttggtgatcagccctctgtcatatgtggggttggtgaaaatcttttcccattctgtggactggcattttgttttgctgactgtgtcctttgctttatagaaatttctcagtttcaggagggcccacttattaattttgatctcaatgtttgtgctactggtgttatgttcggaaagcagtctcctgtaccaatttgtttcagggtaccatctgccttctcttttaggaggttcagtgtggctgaatttatggtgaggtctttgatccatttggatttaagttttgtgcatggcgatagataaaaagaaaaaaaccacacgatcatctcgctagatgttgaaaaagcctttgacaaaatccaacatcccttcatgataaaggtcttggagagatcaggaataattgaaacatacctaaacatgataaaagaaatatatagcaaaccaacagccaacatcaaactaaatggagagaaactcaaggagattcctctaaaatcaggaacaagacacggctgtccactctctccatagctagagcaataagataacaaaaggagatcaaagggatacaaattggaaaggaagaaatcaaactttcactatttgcagatgatatgatagtttacataagtgacacgaaaaactctaccaagaaactcttacagttgataaacaccttcagcaaagtggcaggatacaagattaactaaaaaaaaatcagtagccctactatatacagaagataaatgtgctgagaaagaagtcagagaaacatcaccctttacaattgccacaaacaacataaaacatcttggggtaacactaaccaaaaatgagagagacctgtatagtaagaactttgagtctttaaagaaagaaattaaagaatataccagaaaatggaaggctctcctgtgctcttgaataggtaggatcaacagtaaaaatggcaatcttgctaaaagcaatctacagattcaatgtattccccatcaaaatcccaacacaattcttcacaggccttgaaagaataatactcaacttcatatggcaaaaaaaaaaaaaaaaaaaaacatgatagccaaaacaaccctgtacaataaaggaacttctggaggcatcaccatccctgacttcaagctcaattatagagccatagtcctgaaaacagcttggtactggcacaaaaatagacaggtagaccaatggaattgaattgaaaatcccgatattaacccacacacctatgaacacctgatttttgacaaagaagcgaaagttatataatggaaggaagaaagcatcttcaacaaatggtgttggcataactggattgtgtttttaaggagccatgagcacactcaacaatttcttgtccttggggattataaggaatacctgttttttgatcagtttttcacttagtacaaactagctaaaatgtcttactataacccaactcctctgaactttcatacttcctaacaaatcctttccccacattcatgtccttttgttttcttttgtgatccactgagtttaactaaagctgttgttatgaccatgggtttggaattatccactggagcccggtaaattcactagtgagtatttaattgaaggcaatgatctctctgttgtagaatcctcagtagggaaagataaggctccatgagtttgctggttagttttgcatcaacttgacacagatagtgatcagagaagagggattctcatttgagaaaatgcctccataagattgggcctgtagggcattgtcttaatgtttgatttggaagggccccacccattgtggtttgtatcactcttgggctgaccgtcctgggttctataagaaagcagactgagcaaaccatggtgagcaagccagtaagcagcactcttctatgatctcagcatcagctctgcttccaggatcctgccctgtttgagttcctatcctaacttcctgcaatgacaaacagtgatatggaagagtaatacataaaccttttcctccccaaatgtttttggttatggtgtttatcacagcctgttacgataaatctttctgccacccgcttgagttctgcccaacacgtggatggccaaaataatacacagagacgtatattaggtacaaatgctgcttggccaatgactaggatttctcatctgctagctcagtattaattatcatgaatctatatattttataagactcattttattagacaccttcctctggtgtcctcatccctgggatcacatgatggctctgagcagagagcagggaaaagagcgaagggtaaaaggaaccacttctttcttggccttccttaaatatgagtctccctgctatgtcacttcctgcctggatcaccacttctttactacatttcccagaatcctccttgactcctagtcccatctaacttgctgcctcattggccaaacagtacttttttcaacaatcaataagataaacacacagagaggtacattccccatcagtagccctaattaaaataatgaatttcccatccctccacagtaattattgccctggccactcatgctcagtttccagtgtgtgaggaatcatggcagctgtaattggaggttgcaatggctatgccatgctcagacagtggcattgtacaagctcttctccctgtcatgcatctttcacattctttctgtcctttcttctgtgatgttccctagccttaaaatgagtagtataaacgtcttgttgagggccaagctcttgtctgctcatccaaagagtgactttggaattttgatgatgacggcactgactcttttgattggtaagatggccattttcacaatattaattcttagctgtgagcatgggagtcttcccacttcctagtgcttccaagttttcacagtagaggtcttcttttactttagatttgctctaaggcaattttttcttgaggtaattgtgaaatgagattgcttttcccaattactttttcaatatgttctcattcacctacaaggatactaatttttatgttttgattttatatcctcccattttgttgagatttaaaaaaaaatcagatccaagagttttctgatagagtctttgttgtctcttctgtacgaaatcatattacctgctagtagtgaaacacatttcttcctttcctatttatattcagtttttctttgtcatattgctccaacgtagaccctgagcactatagcaaataaaaatggaggaaagccatttctgtaggaacatcctggcactgctgttaagagtctgtcaagggtcctcttcccaggatgaacttcagtctgtcttcccatctggcctagaatatctggaggcatagaatacctatatttaaatgtctttaaccttgagctaattgcagattcatgtctggatggggatctacaaaagactctagatctgaccaaggttggccaatgacactctttttggtaactcaagctgctgtgcagactacagtgatagtgtagtgcatttttatatggttaaatttactcagtttgaatgaatgtagtattgtttttcatgttaaagatcttattcttagagttgattattttaatgttggcagctttgtatgggtcccacccatttcaggggatattgactactcttggatgttatgccaagttcgtgagacctccccaaagaccaccaaggaacagactcaccaatgcaaatgcacaaggtttattgttaaattacaagcctcagcagggaccctgtccagcaaactggtgtagcagctgcaggaaaagggtgcctggcctcaattgcaagggatttatataggaaaaaccgcaatcagtgtggtacatgcctcggctgttcaggattgggtaagagtaggtgggtgacctttgggtttattgatgggggtgtaggagaatttcaaaattgttactaacagttgctcacaaggacagttgtggggagatgttatttaccaaaattagtcattgcctgaccaaccggatggggtcactttcacctgggtgggatagtttgggtgctccttgaaactgtttatggctctttggctggagctgaatcagccttgtgccacacagggaatttctcaaggtgctttttctgaggatggttaactccatcctctcctgtttaccttgttctttcatgggaagcgctgtgttttggttactaatgatctaagaatcaaagatgcatctattctcgcagctgtcgcaacctcagtgctaatgacatgtgttaccgatttttttttgtgtgtgtgtgtggtgggcacctacctgacattataggagttcagcagtgtcattgccagcttcttgtgaaagacccccgaagaggtactttcgtataaggagacccacacccaggaatcagcgaggccacgaacttggatgcaaaagcaagaggctttattggagacgcgggtacccggggcgacttagcttctgtatggctaagtgccccgagccaagggaaaggggtccttatatagggaaaaaggcgcaagctaggagcagggattctattggataattctaatgaggcattgtacagagctattcccattggtcaatgtatatgaggcgctatacagggttattcaaatgaggcaaagtacagagttattcaaatgaggtgaaacatagagtctttcaaatgaggcaaaatacagaatcatttctattggatggttcaaatgagacacagagccattccagatcagcatattctcaaggtctggtgtctggtgtctggtacagcagactcaatccccccccttcctgatggctgaccttgggggcggagaccttgggacggagtgtttctcttcgggcgggagctcaggggcagggctccaggccagctcacttggtgttcgtgccgacccacctggtgctcgccctcgtgccggcccacccggtgctcgttctcgggccggcccacctggtgcttgttctcgggcccggcgtgcggcgggtggcaggggaaggcctccgggggtggggattggggaagccgccgacaggaggaagaggagacaaacttgagaaagaaagggctaaggggcaggggtctttcattcccccatttctcttgtaactgaatggaatctttcattcagaggtctctggatattctggatctatttgctttagctgatggtattgttgagttaagactaaggcctgtacaacagatagtcgttctctgatgaattgagtcagtttgttcagaatgcagggaccaaatatgaggatcaaaaatagaataaccagaggtcccatgagcgtggatataagggtagtcaaccagggggacttagcaaaccatccttcgaaccatccttgttgagactcaaatagctgttgcctctgctttagcctttccctaagtttggccatgctgtccctaactattcctgtatgatctgcataaaaacagcattcttccttgagggcagcacatagccccccttcctgtaaaaataataaatctaatcctcgtctgttctgcaggaccacctcagagagtgatgttaaggatttctcgagtgcactgactgactcttctaggacctggatatccgtgtgcatggcttgttgtagaagcttaaaatgattaattccctgtagggcaacggttccggtccctatgccggctgctatgccccccactgttattcctcctaataatagggccacggtaaaggatattggctctctcttatattgggttgatttctctagtacgctgtaaacatattcaggttggtggtatgtgactttgggccaaagttctatcaatatacaaaagtcaatggtggtgttgagaacagtggtagagacacagggagtcaacccagtactgcaagcccaataagttccataaggggcaacaaggtatcggctgtcctgagataatggctctacttggttacataattcttgatgtgagggaggaatcctgcctatgcatagcccctttcctgagacctcagatattgtgagcttgtgctgcatagcagctccacaactggtaggtgctgaggtctggttggagtagttgcccagtattgccacgccttcataatatgggggccgggaaactaggcataaccagcattcctgagtcttgttggggtctgaaaaatttaaggcttggtaaactccttggattaattgtaataatctatctccggtacctggagggtctctggttatctctatgtttagggcgtctggggtgggggagaaggtgacagcacctggtgtaggagtgatagctttaggaacggtagggggttcagggacttgaaattgggttggggctctctggtccgctattactgtgtttggcctgactgattgttggcttaggggagtaatttgtctgtacagggagaataaggtcaccggatctttccctgctcggtgcagccggagtccccagactttaggactatcccaagtagtcctttttccagcatctgtgaaccttaggatgagagggttgcattttcctccgggggtggcgccttgaaaacctccccctccggcattatcataacagggtccgcaggctctttgcccacatctccatggtcctttccctgcataccctgggatctccctccatttgagagtgatgaaatcccaagaggaagagggtttccagtaagcctcccctgtggtttcacatccccatcttgcacagtacccttcctgtggccccccgcagccatgagttggtttatggccggggcaaacataaaaatccttgcttcttgttcctatccttcccccagggtggtggcatccgtaccctgggaatggttcctggtcagagggatcccaatcagaccctactaagtcacataggtcgacatagagaggagggaacccatcatgtagagtccctatataagtgctgaggttggctatttccccggtccctagattggctattttccaggtgatattataaaccctgtgggggttagttgctacatggggggtaaacagacaaccaatcaacaggagggtgtacgagagagtcttatctttaaaggattttgagtgcggtgtgcggtccattctgatgcagtggctgaatcggtgggtcgggctggctttacatgtgaagcatgtatccaagctgcaatgccgtctaccttgagtgcggtgggagtggtaagcaaaacgatgtagggtcccttccagcggggttcaaggttcttggcctggtgacgccggacccaaacggtgtccccgatctggtaggaatgggggatggtgggatggtccctctggtctttataagcttgagcaaggggtttccagacctcccgttgtactagttggagggcctgtaaatgagcttggagagaaggggagttagcaaaatctgagacatcttgatcaagaaagttaatgataggagtaggtactccatgcaggatctcaaagggtgtgagcccatgtggtccaggggtattacgagtgcggtggagtgctagggggagtaggaggacccattctctagtgccagttgcaagcgacaattttgttaaagtctccttgattgttctattcatcctttctacctgtcctgaactttggggtctataagcacaatgtaatttccaatcaatccccaacaaggtggccactgactgacttacctgggagacgaaggcgggcccattgtctgttcccagtacctgaggcatcccataacggggaaagatttcttcaagcaatttcttagtaacgatcttggctgtttcatgtttagtagggaaggcttcaacccatcctgaaaaggtgtctacaaaaactaatagatacttgtatccatatttacctggtttaatctcagtgaaatctatctcccaatgtgttccgggccggtagcctctgacccggttcccgggaggaagcttcagtctggatgcgttgactcgggcgcacgcatcacattgctcagttacctgttttagaatatcattcttccccaaaaggaaattgaattcctcttctcgttcgaggagctcccgcatcttcttggagctcagatgtgtcatcttatgtaaaaatgtcactaggtacttggttacccggtaggggatgacagtctttccttcataagtccaatccccgtttggttcctttgtggctcccaatttctctagggtttggatgtctctttgttcatagtcccatgaggggaagggatggtcgttggtgggctctagagccaggaggttagtggtgtctgtggtcagggccgcctctcgggcagccaagtctgcccttcgattgccccttgcttcaaaagaatcccctttttggtgtccagggcaatgtatgatacttaaggcggcgggcagatgaagagcccttaagagagcgaggatttcctccttatttttaatgtctttcccttcggaggtaaacagccccctccctctgtaaatttctccatgtatatgggcagtggcgaaggcataacgactgtctgtatacacggtgagcctcttaccttctgccaattttagagcctgcgtgagtgctatgagttctgccctctgcgcggaagttccaggggggagtgcctgggcccagacgacctgattctctgtggtgactgccgcgcccgcccttcgttctccttgatgcaaaaagctgcttccatccgtgaaccagatgtggtccgggctgggtagaggctggtcagtcaggtcggatctcgccccatgggcctcggccaatacctgtaagcaatcatgagcctcgggctccccagggagggggagcagggtggctgggttcagagtcaccaaaggcccgaagtggacccggtctttgtctaacagcatagtctggtaatgagtcattcgggcattagtaagccatctgtctggaggctgtctgatgactgcctcaactgcatgaggggcatgtatggtcaaaggctgccccaaggttagcttgtgagaatcttttaccagcagggctatagcggcaatcattcgaaggcagggtggccatcccgatgccacaggatccaatttcttggagaggtatgcagtgggccttctccaaggccccagtttttgggtgaggactcccttagcatagccctctttctcatctataaaaagttcaaatggcttagctaagtccggtagacccagggctggtgattcaaggagagcctttttgatgtcggtgaaggctttcttttggggctcttcccatttaaaagcaacccctggccgagtgagggggtagaggggagccgccatttcggcaaacccggggatccataggcggcagaagcctgccgttcccaagaactctctcagttggcggggattttgtggggtgggaatgtctaagatggctcgcatacgggcttccgttagccatcgccgtccatcctttatcttgtatcctaaataggtcacctgtttctgacatatctgggccttcttggcggatgcccggtaccctaggctcccaagagtctggaggagggcttgagtgccttccttgcattcccctttggttttggctgccaggagaatgtcatctacatattgtaagaggattagagcggggtacctaacccggaattctgccaggtcctgatgtaaagcttcatcaaaaagggtagggctgttcttaaacccttgaggtagcctagtccaagtcagctgcccagagattccaagggcctcgtcctgccattcaaaggcaaatataggctggctggtgggatgcaggcggaggcagaagaaagcatctttaagatctaagactgtgtaccaggtatagttaggtggcaatccactcagcaaattgtaagggttggggacagtagggtgtatgtcctctatccttttattgacttctctcagatcctgcactggcctgtaatcattagttcccggcttcctaacgggtaacaagggtgtattccaaggagatttacagggcaccagaatcccttgttcaagtaaccttttaatatgtggccgaattccttcgcgggcttctttaggcattggatactgtctgacggatgcaggaaggatggcagcttttaaggttactataattggggcctggttaatggcaaggcccattcctcctgtttcagcccaggcttggggaaattccgcaagccagtggtcaagggtttcctgattgttcgagttagtcctcttttcatggagtctatattcatcttctatggacattgtcaagatggtaaggggaattccctctggccctgtgactttgacttctgacctctcaaagtgtatttgagcttttaatttggtcaataggtcccgtcctagtaaggggtaggggcaatctggcacatggaggaaagaatgcataaccttaccggtcgcgagctggagctgccgatttgtagtccaatggtactgctttccgcctgtagctccctgtacccatgcagtccggtgactcaggggtccgggtgaccgattcagaacggaatgttgtgcccctgtatcgactaggaaggtgaccggatgccccccgacttgcagtgttatcctgggctcagggggggggggctcctggccctgactcctctaatcttctaggttcaggaggtcagaagcccttggccgtggaagcttggcccgggggttcttagggcattctcttgcccaatgtcctttttctttacagtaagcacattggtccctgtccaggtggggcccccttctgtcatccctctgtctattctgtctctggcctgtcactactgtggccaatagcctgctcatttctttattccgcttacggtctcttgcaacctctttttcctctgcttcctgtcttagtctttcctctctctcctgggtttccttcctccaacgttcttctctttctgtctgtgtttccctcttattaaaaatacgttctgcttccttcaacaaatcttgctagattctgtagcatcccattctacctagattctacaactaaaagtctgtttcgtttggctatggaggcagagcctagcttaagctgtcttcacactcattggtcctctacattcagactccagtattggagattacgaatgtgtgtcactatttgggctttagatactaggaataaataaacaaataaatgtctctaagcatccacaaatgtttgtgctatcttcattgggttggggtatagtttaaatcctaccccaaagtctaataaaatttgctagcctagaagagtgattttgagatcacagtctctgtgcattcttgtgttgtgaattcaccttagaatttcaatggcaccagatctttaagaatggaacatgagagaaaggatggtgcttttagttaaggtgctggggagatagtgtttgcatatccagaataaaaaaaaaaccacaccccagtctcaccaattacaaataaacaaacacaacaaaaacccaagcaaacaaaaacacaactgcaaatggattaaaactcccagggtggtagcatgtgcccatagtcccaacatgcaagaggcacagcccagcagagtttgagactagccttgtctctaaacacacacacacacacacacacacacacacacacacacacacaatttaacacattaaagatttaactataacacttggaattttaaaataacacttggaattttaaactaatagaagaaaaaaatcagaaaaaagcttcaagacaatgaaatgggctagaatcttttaaaataagacgccccaccccaccccctggaaaatcacaaaatcaaaatcaaaagcagacaaactagctgacatcatttgaaaagcttcattgaagcaatggaaacagcagagcaaggggaaaattttaaccaactattcatctggcagaatgtcaaggtccaaaatatacaaggaactaaaaacctcaataacaaaaaaaaaaaaaccaaaataacacaatttaaatatcaattggccttaacggacatttctcagtcatacagatggccaggagatacacgaatgcccagcatgcatcatggctggatccataatgggagaccatagagagctggggatgcttctgctgatgaagtgacagcaaagacagattctgggtgccacaataaacctcccagctggaagaaattgtccaaattaaggtcttccttcctaattacttatggcagtttctgcagaggcagggaatggctgaaggtagactccctaacgtttattccccaatgcagtgctgtgcctgttgcaaatgcagcccaacaaaaagcagcactatgttagtctgctttctgttgctcagacaaaatactggtggccaggtgcactacttattttctttgttgctgtggtggtttgaataggaatggcccccatagactcatttgtttgaatgcttggctcataggcagcagcactattagaagatgtggccttgttggagtaggtatagcctttctggaggatgtgtgtcactgtggaggcatgctttgaggtcttataagctcaagtctaccattataacacagattttcattctactgtctgtgtatcaagatttaagactctcagcatcttctccaggaatatgtatgcatgccaccatgttctgccatgatggtaatgggctaaacctctgaaactgtatgccagtcccaattagatgttttactttataagggttgtctggcataaagtcatacatgcagatagagcactagagcactcataaagtaaacgaattttaaaaacaaaaggcagtggggctttgttgtttggtttttagctggtgattatctgtttcctcagatgttccttggaaacagggaccacaccggttatcactcaatgcatcctgcctcatttgaaaaaaaaaaaaacaatgtaattgaagttcacggaagagagaatttctaaagtgacaagttgccttttaaagctattcccatatcttattttcgaatttactggcagtaattaatctacattattaaataagtttcagttcactggagctactgaataattactatgttagttaagtagtgtttctatgacagtataagtttaactgaatgtgccaagttgtttttagggagtagtctcagaattctttgaaaagtggtgagaaacacatcattcatcatgaatttgacagattaatgattaagagaacagcatgaaatatagcacgtttaaagttttaaaattcaaagcatggtcaataaggattattcctaataatattttactattttttccttgaaggcaccgtgacagagaagctttccccaaagattatgacctagaatgtcccggggcagagaaaaacttctgtaattcgacatattgtcgatttggaaatgacagttcagtaagtagtagctgttaattctttgtctaaaatctttatcatcctgaaacaacaaaaagttaaggtgagaaatatcttttccaactctggttctcatttgtgacatttagttaggtgacttagttgcacttagcaaacctttaaaatgcacctgcttcttaaggttattgagtgaattagacacaacaaagtgctcagcatgctgcctgactgtgttagttagcttccagttgctcgaacaaaatattggacacaggctacatatgaaggaaaaatttttatttgaacttgcaattctggaggttttaaatccaaaattaggtcaccccactggtctgataaaggtgacatgtcattgggggaatgtatgtcagggtgagtagccacattttaagacaggaataagaaggaaactgaaactgggccacccaatttcctttgagagtataccctcactggcctaatggcttcctctcaagggagtctcttacctcttaaagatcccttgtgctttctagttgtaccactgtgggaggatgtgatgctatgctgcatagtagcatcttgctggaatagtaacatatttctggataacttccatcttctagaataaccgtgtgaagccagtgtggtggtttgaaagaaaatagcccccaaagggagtggcactattaggaggtgtggccttgttggaggaagtgtgtcactgtgggggtgggctttgaggtctcttttcccaagctttactcagtgtgacagtcagtggacttctgctgctgccttctggtcaagttgtagccagctccatatctccttgcatgctgccattctccctgtcatggtgatcatgtactgagcttctgaaactgtaagccagccccaattaaatgttttctttgtaagagttgctatggtcatggtgtctcttcacagcaataaaaaaaccctaagacagaagttggtatttatctccattttatagaggcatggagagagctgagcagttcattgagagtcacgtagcaagggaaatgggaaaatgaaatttgaacccgggtctatgattttttttatactttccttcagataagttttataagaaattaaaccttctatcataaaatttgggggtccagttacagaaagaatatgcatgtgtaagcaattactgtttgagtcatgtggagtagattaatgcttgtccacttgagtatctatctagtcaacataagcttagtggtctaagaactccttacttgtgccatacaatggcagtagctttggggctagatgaaagcctggtttaagggatggaagagatgactgagtgagtgagtgcacttgctgcataatcatggggaccagagttaagatctcagtattgacacaacaagcagggcatctgtcactcagctttaactccagttccagggaagacagaaacagcaaggtgagcttggccagacaaaaacaagtgaactccagtgccaaggagggaccttgttcccaccccctgatggggagaatgatggagagggacccatgccctctcctgacctctgttggtactgtgatctaaggcatgggcacctgaacatacgtgtgtgcatgtacaccatacactcacgcacaatagatatgtacacaaataaattctaaaaacccctacaaacccatttaaaccttgggatgtcttcttggcagttggccagcacatgggtggagttcatgtgcctaatgctgagctcagccaacagcacttctgctacccttgtcctaatcccaggctttcttgagcatctcttgggagatagcctcaggttctgaagagtgggttacttgacacagtagaaggtgaacatgctgcgaacactgggtaggtctcatattttgcccctaaaggatgatgcactcaaatagctttgtgatattgccagacctgggaaaagacataattatatattggaaattagtctagaatattctctgttctctacagtagatggaatgaactgacttagcatggtagtttggcttcctccatttcttttagttgtaatgagcagagaacaagcaggatgacctggaaaagatgagattcagtgtaaagttgcagctggtttgatgtggaatgaggcaacttttaggacccaatacattggtagagaagacacttcctctgcaccgttctcattcacacacatggggttttcttcacatatctatttctctgttgtctgtctgtctgcctctctctctctctctctctctctctctctctctctctctctctctctcccttccctccccctcccttccttccttccttctgtccatccttccttgctttttctttttactgcgccagcccaaataacatggtcgatgtgagatttccgttttctcacccaagcttcttgctctatgcccccaaatgtctccttgacagtcagccagcaagtgggcagagcttatgtgtctggtgctgagttcagttaatagcacctttgctacattccccccaaacctgggctgcctcgtgcatgatcagagcaagagaaagttaagcaagatgcacattgcctctggcttgtgggagatgaagtgaaattaaggtgcatgggttttagacccttccttctttggcttctatatattatagtggtcaaggcttaaatttaacagcaatgtttgcctttcctatacatttggtgatgatcgtggaacccctgtcctcctcctaccagtttctccatagaaataaaaccaaaaataaataaaaaggaaaggaaaggacatgagtgttcccaggtgtggtggaggagaaagtttactatagatatgtgggagagcatagaggcagaggcaactaaagtatggagtagacatgacaagggggagggggaggggaagagagagtggagagagggagccagatacagcagtcaggaggccccgaagagagtacatgatgagaatctttaatcaaactggctggagtttagggtagtgggcagggtatatcagccaggagggccctgtaacaggttggaactgagggatgctgggagaacctggtggccagatcctctttgatatgttaaataagcacctcagctgttcctcctgggtttgaaacttgagggtttctggtctgttttagatacaaaggaaatagatgaagaaccactaattctggtaaaaccacaattttcttatcttagtaagtctagttttctgataagagttttgtctattaagttactgatccatccatttttgtttttcacaacaaagctacaaaattgtcaagaaaaatattaattactattctcattctaaacatacccttattgacggtaatatcactcattcaatgtccccagtgtccagggagaggcagacaccaccagttcagggcttcctggccaccatgtgatgaattagtgagtcccccttcctgcttttccaaagttttagcataggcctaaatactagaacactgtttgtttgtttgtttgttttttgagccagtatttcatgtaccccaggctggcctcaaatttcctatgtagctgaggatgactttgaacttctgattttccccaagtgtgaccactgtacccaactatgaacacccttgatagaggctagcctgccaaccatctgagacctctgaaccagaaccagaaccagagtaaaacagtgttagctgttacgcttttggagagtgctggtttgaaggaggatttgtttacctgacgattgctggttcctttttctatagttgagaaaaactgttcagagagacatctttcctgacatttcaaagacatacggccctagtctgtgacacgagcttgagaatctcagtgtgaggtgctgctatctatgcctgatgtggcagaatacagagagggagcaagctgcactcagagttgtcaagtaactttgtgtttgcctagatgagttcaccagataaaatctgtgggagtcctttaagaaagactgtaggactgggacagagagccagccacccagcaccagagacctaccaaataactgatgttactgtcagaggactgactctgtgcatggtgggggatcttcctaatagaccacactgcctctagagtccaattggagacatgtggtgagggcaggaagattatgtctggtgttgccacactgggaaggaatagtgaaagccattataagccctcaccaggtaccaatgggaacttagggattgtatagaagaataaaaggatggggcaagaaatatgcatattcagtcttagtctaactgatcatgatctcaggtctggttccatgaggtcctgctggcacaagggaaaccattatggcatgaagttactgcttctgcctggaggtgggaaccagtctgttagtcatagcatgtaggcagcagggctactactgtagggatttgggataaactggaaaggactcagatcataagctatggcagtaaaacatatttaagataatgactgagtctctccctcagggaaataaatgatgaaggagcacacttccatcttggaatttaaagccatctccctgtaaagacaaactaactaggttcattgcttttttatgattagacctatttctcaagaattgggttatgctctgcctgtaaccttagctgcaactggttctgtactccctgttccaggaatggcaatcttgtctttgtttcaaaaagttgatatgaccatattgcaatcctaccgttatttcagaagattattatgaccacctgttgttatgactaccttgctaggttctgtgtctataaaccttgctatcggtaaacttgccttttcctgagctataaaaaccttatctcctacatatccaaagctgacctcttgaaccctgccatgggagagggctccaggtataagaataaaaagcttacttcaattcattgcttgttttaatttggccatggtgatttgtgtcagtggtctttctccttgaatctttgggattgacagaaagaacatgttagaaggagctcctgctaccttgtttgagcctgggacggagtagatagggagttgagggtggagctctgtttgtctccagaaggtagatccttagtaaaagaatgtccaaaagcaatctcaaaaatgtccaaggagaggagttgaccttgaatgtcagctaaacccatgtgctctggctcaggtcaggggagtaagggccacttaacatgacatctttccacccaatctctccctgccagttagacctggcagggatccatgagcagagaagggagacaggaaagctccatccatccttgtagtttaggctcccagacctgcagccctaaattgagaaacatttggtataaaagatagaagtgctgatctcactgaatgggggactttcataaatggaattatattcttctggagacttgaagggcatggaaagctatactactatgctaagacttctatcaaactgggggtgacaatgtaccgagggtaagaatgtactgggtgtgggggactgcagggacagcttagctaaaatagtgttgtggtttgttctatcagtgttcagtgtgatagctcagttcagtatgaaaagcaccttgtttcactctctgtatgacccaggcaggtaccatacgtgacctgtattatatagagaaggaaactgatactatgtgaaatcaatcacttgttcacggtcagatagctggacagtatatcacaatggcactaaagtctgtctgaaatattgctgctgttgagacccagccttcatcagctcagggaatgagggggattcatggagttgatgaaataatcacacaattgacttttctatctgagggagtaaaagttaattctctggacacacacacacacacacacacacacacacacctccaacatgtcaggatctcagctaggctgctgatgaatggcagctcttcagcaggtcagagaaactgaagagaagatgcagagcaggccaactactggacagacaaacagacacacaatgacttttctgagggtcaaatcttagtttttcattttattattctttttgttgcttgttctactctattctttttctgttctgttcttctaccctgaggttccccttctgtctctcttgatgtctttttttgctagctactgcctgatgtctttcttctacatccttctcctttttcctttcagcttgtatatcccagcaaaatctttcaagcagtataaaaattatgtggctacattctattttttaagtaaaggattgcaatgaacacaagtaaaaaaaaaaaaacatgttttccatatgccttacatgattaaacactttacatattacaggtgaaaaacaagtcatcccaagaacccacatacattcattcccaagcaacttattacagattaacagagtgtaagcaagcaaggcatttttctagccagttcttttgctggaaggctgtgttttgcagttacaaaggaaagaccaattattttattatttgtcttaaaaggcaaattttaaatcttaaaagaatcacaaatctaaacttttatatatgaaaaacaacccagtcagctctattttaaatcctcagggtgcatactcattcatcaactgtatatatcaggaagctgagggcagaaatgggtacaaggaattaatcattacctttgatcaccagcccatcctagcaagaaaagttcgtcagatagcaatggtcattgttttttttcttgacctcaaccctcaatgaatccctcactgtgtgcctttctaaactttaaattgttcctcaagattttctacctcagggccattaacaaaaacatcttaacctgactttactaacaatatgcatgtctaaattctttctaagggtggtggttgaatcactaatctgctccagcagcaatgcttggaaaaagtcaatcaccggagagaaccacactgagtcgtggaatcctgtcaaagcagagtctcgctttattgtaacagacgttcacttatatagagttgaggaagtgggtggggacctcaggatggagtaagatgtaagggccaataatatctcaccacaccagcagcaggtgggcagaggcagttttgctgagtcaggtccccaaactctagccaggctcagcaaattccactaggccttgcgtctgggtctttttaggcccaacattccacttctgcttattggtcctctattatggctcccaaaacagaaataccctttcaagctgccacttgcatttgccacagtgttccacaatgagtcaaatagcttattgatccccatacactgcatcctaactattctgtagtttttcttgaaataataaacatttcactgtgtttattatttatctcactgtgtgagatctatctgtctgtcatctatcatatcatatatatagtgacaccccccaccccacccccacacaccactatgtgttgggaccttgatgttctgtgtctgaacttgagctttgtccccttcccttgagttatgtgtgcaaacatgctggctagctctttcccatctgtttcatcccaagaatgctttcttagcattttccctttttttgcaagatgtttgctgagtggatgtctcttatgcccaatagtatttctgtttagctagttaaaagtccatatgcttgaattctctggattactgtgggcatcatttatttgtatggctctgtctatattttggctaaggttctaaatagcaaaaacgaagtttcacaaactgaagcaaagcatgaacttagatgtgcaaggtcctcatataagatggtagcattagacccccattcataagaatggtataagaagcttgggatccaaggaggagtttgagagtttgagggaggctgtgctctaccttgcatctgtgaagctccttggatgatgtgcaattatagacacaaagctctggtgatctacctaaagaacagaagagaacgagggagatggctatgtgactgccaggcgtggagcaaggatgtccttaggccaagaagtggtttttgtgaatcaagtgtgtgccacaaggaaggaaaagatgacatgtggtcatttcagagcctgtcctcatgtgggatgggaggaagaccacctaaattcccatggttgaagcaggatgttatttcatttacattttctcagaacttggcacagaggtactgcatgggcataattttcatcccctctcccatctccaactcctcctgtcttctttgcaccccaaattcatgacatttggagcagcatattaaaatacagccgaagtcatccacatcatgagatgcaccttttattcttctcagagaggatcttaaagagacagcagcatcccaagaaggtcatccttgaatatccataaatgtcaggaatgggtggtgaaacatagacatacccagaggaagcaagaaccgaattgcatcctaccctttttatgtctgcctctctcctgccccacatcctgattcccttgcatcagcaccctctcacccccacccagacaagagaggtctggagagtagtaaccaattccaagagtgcagaaagacaactgtgccccctattaacattgaagtcaatcaagccaaagcaagcccaaggcaaagattcttcaactttaaatgcagtgtagcctttgtgtaagggactgagtatgcaacctacccagcaagattcttcttggggaaaaaaaaaaaaaacagccagagcagctaaacagaaaaggcctggggctagttttatatttcaccatgcacaagaaaggaccagcccctccaaatgactgagcaggggcagtggctggaggaggaaagatgattgttttctagttgttgccagggagaagtcctgcttactcagtgtaactgctgaccaattacagtctctgaaccctctctattctctgtcctcactttgggtttctttgcacccaacacatttcagacttagctctcgtctgtctccctctacgagagtacaagctctataaatgtagaatctttggtctgttttggttcttgttagagccccaattcctagagcagtgcctagcacatagtttgtactcaatacatatttgtggaagggaggaagaaagcaaggaaggaagggagactggaaggaaggactatattaaataactatgtatagaagcatcatcctcttcatcttttattgttattattataattactagtgtatgtgaacacacacacaagcatgtgcacacatgcttttacctggtaagctatctctgtcagtgaggtgggagctactggataaatagacaacttcttaagcaatgattttttggctctccttggactaaagttcttatttgaataaagttgaaggagagagtaagacacttgttaccagaggtttggagagggaaggggggagtgggagggagtagagaaagggagtagctagtacaaagtaggtaggggaatgagtactgctattctgttgcacagcaccaaagctgtagttcatagcaatggacttttgaaatagataagaagagaaggttttattagtctttaaagatatggtaaacatttgaggtaatggatataacaattatgcagatttggtcattgcacaatgcagtatgttgaaacatcacagcctatgaattcatacaattagtatttgtgtgataaaaacattgaagactttaaaaagaataactaatatgcctaaatatgaactatgttggtggaaaacatggcattaaaagttaatgacccaaaaggagaaataagaggaaataattccaccagatctcagacattccagtatggctcactttgttagtttagatatttgcctttgacttagtagatggtaatttgacagtgtgatcttaaagatgactctgatttagcagatggtaatttgacagtgtgatcttaaagatgctatagttgaactttctttggaccaccaacttccaaataatgacacagaggcttcttattaagtatgaaagcttggcctttggttaggcttgttcccaaccagctttttaatttcttttaaattatttatttatttttattttatgtgcattggtgttttgcctgcatgcatgtctatgtgagggtgttagatcccctggagctgcagttacagatatccaactagctcttaaaaacttaaattaacctatatttattcatttatgtcctgccaagtggctcattacctcttctcagtactgtattccaactttctccatgtctccatgggaattcctcagagagttcttacctctctccagaaggccccgcctgtcctctcctgcctaattattggcctttcagctctgtattaaaccaatcagaagttgcctttcccccaccttaagcatcaagtggtgtttctaactgtttattttttttattgttctatttaccaataaagactcaggagtcagacgttggggtgaatacctgtagctcagagaggtggggcagcaacaaggtgaccttcccttccggccagagaaccaccaagcaagcatctctccagccatcccccccaccaaaaaaagactgtgaaactccaaatccccctccctcctccttcctgcccacctctctccatattcctagttctttcatattctctatggttaattcctgtcaactaactgctgactctgccccttaatccaagattgattttaatacagtcttcatttcacagtgtgatcaaatacctgtaacaagatgcctcttgtcgtcctgcctaaatatctggaggatatttagaatcttacagataaatcacttgaagtgccgttataaaggaaggcactagggagtgggctgctgagccagggccacttcttgtttcctacctctgcatcttcctaatgtgaagctgatagcagccttccatgcatccttcccgagaactcctttggaccatccttcctagcatcagaacagctgcatctgcctttcctctttgaggagttctatatacattttggtccattgagtggtcctagcctgatttctgcttcatgtggtggtttatttcttctaccaggtatcttctgtgcaatttctaaggattggggacaggaatgaaaacaggacacagaccatttagatcatatcactcccctttggttttccatttgtgcaccagtcaccatgccttaatttagcactggcatgaactagttttttttatgtctatcagtttgtttaagcaggtatagtagtcacattttattaataggaattaaatggtatggtcacagacatacatacatacatggtggaacatgcacacacatggctttgtggaagtaacctcttcattatgcttggaaaaagttgtgaatttgagaggtgggatgacatggaaggagccccagaggggaaagggggctaggaatgatacaagtataatactcgtatatggaagtcttgaaaatttaagttaaaaattcaactcaccgttgtttcaccctcaactttctttcatttgggtaggtaggtgtctacccaaagtaggtcataatttatccttaatacttattttctctatttcatttttaaaattaacttataaagcaacaactggagagattgctcagtggtaaaaatcacttgctggaccgcgttcaattcccagtaccccacatgacagctcacaactttctggaactcaagttctaggggatccattgtctgcttctaatctccacaggctccaggcacacatgtggtgcatagacaagtgtaagcaaaacacttataacaataaatatttaaaaaaataaaaaccctaaagtatcaggtttacatatggcattttcttttttgttttgtttttcgagacagtgtttctatgtgtaactttggagcctgttctggagctttgttgaccaggctgacctcacactcatagagatctccctgcctctgccttcctcctgcagggactaaaggcatgtgctaccaccacctggctacatatggaattttcacacatacttaattttggttgattctgtccgcatcccaccatgtctcttcatttctctgtcatcttctcctctcttcccttttgcccgattgtttcctttcccacttagttctattgtcttccctaaccctttcctccaaattcctcttttctttataattccatgggctcctttctagtctcctggcctttatatatttactcccacctatgtataaatatttaacagttgcaggctggaatctgcatatgagagagaacatatggcatttgtctttctgagcatgggtagcattgcttaattacaatatttttcagttccatccagttcctggctactttcatttttctttatggctgaataaaattccactgcatatatgtaaaatagtacccggtacaagtaccatcaattttatggtgagatcataaaaagcctattggctgtgttcctgtaattagaatatcatgtcaaagtaatgaattttgtgtaaggccaaacctttctctgtgaagcaatatagctcactctgggtctagaaaagactgcagatggggatcagaagatgaagcacagggaactgattttctatcttcctacctgctccactaccccactccagacacctgaacaactagaaggtacttttgtgattgcctactgtcagtcacttaaccaagactatttcatgataggaaatggctctgctgtgtgtcaggacaatcagagaacaaacaagagattacccaggatttatttcttttagggacaagaaaacaacaaaacaaacatacaaaatcttagaatagcttgctttaacagggagcaggggaaatgaaactattgtttttctgattgtattctatgaggcctatttgttcaaagcaatgctggttttatttgtggggacctctctggatcctctagattctgagtaaagctagaggtggaaacagagctggtgtctccaaggacagcacaactgttgagaaacaagaatgacctttatgatgatatattgttatttatttattattattattgttatttttgttttcttgggagagagtttttttgtatagctttggccgtcccagaacttgctttgtagatctggtcctgaactcacagagatctgcctgcctctgcctcctcagagctaggattaaggcgtgagccaccaccagcagctttattttttaaatagatgaagcaggttgtatttttccatttcaacttctttttaattaaaagtattttattcaatatactttaatacgttttctctcccctaactcctgccagattcttcacactccatccagctttgtgtgtgctcgctctaaaaaaacaagcaagcaaataaacagaaaccacaaggaaaaaattgaaaacaacaagaaaaacccaaaattaagcagatcaaactatgaaacacaaaaactaaaatcagtacaagtaggcaaaaagagcaataagacaaaagaatgccatactacagaaaactgaaaaagttcacaaaatgccgttgtgtttattttttcattgaccaactactcctgtgcgtgagacctaccctgaattgtgactaatatacctagggaaactgttggagaaatgtggttttcccttttccagcaggtgttggttgcagataggttcttggttaggggtgggagcctgtgtccacttccctttcttagtaatgggaccctgtgtggcttgaacttgctcaagtattgggcatgctgctacagtctctgtgagtcagatatagatcagccctattgggcctagaagacactgtttccttggagtcattcatgacctctgtctggcttttacagtctttttgccttctatagatccctgggacttgaggggaggagtttgatgaagacatcctatttatgattgactgctccaaagtcttgcactgtcttcacattgtccagttgtgggtcttgtatcaataactctttcagccagtttacccgagccccaccaccacgttaaggtccctagtaacttatactaggtacaatgctgctggccaatgacttggatttcttatctgctatctctgtcttaagtatcaaccataattattaatctatatattttataaaaattattgaggatgctggtggaatgagtcctgttgccctgacgatcacatggcgactccttctcttactacattttccagaatcctcctctactcctagtcccacctaacttgctctcctattgtccaacagtactttatttatcaaccaataagacaaacatacacagaaggacctcccccatcagggtctctgtgttaatccctatatactgcaagaagcttctctgaggagggttgggcaaggcactgatctgtgggtatagctgaatattattaggaatcattttattgctatgttccttcagcagaataatagtaatggaactacctttatgcccatgacctatctaatcttaggatcttggcccctttagcagtatgggttttacctcatggactgagccttaaagccaataaaaaggctgttggttactaccataaaatttgtgccccagttttaccagcatgtcttgcaggtaggtcagttgtaggttttagggtttgtagctgggttaatgatcatctttttcctccagtagtgtgaagagtaacttccagtaccatgagcacaagtcagtagggataaagcttctagttggatattaacttgatttctctgtgtccagtgacatacaaattgtgttcggcaatagggccttaccatcagttgtggagagcaaccagtagcctaagcaataacttgtgatgttttggagttccatgagggagaccatagtaacacattcctggaacaggaggttttacttggtggcatgagatgtctagttggtgcattttattccctattatttggtgactcaatttagattccttccatatatgtatatgttttaagaagcatgcacaatggtagttttccatattttttccaaatgtccttcagtgtccgttgtccctccctatatttccttctttacccttctttcccatcttccctagttaatcctgcttttctggttttacctttatcactccacaacattatatattaattttccttgttagggagattctctcctcccacctcatcccttactaggtacctgagctctgtggttattcagattgtagcacacacatcgaaagcttataagttaatatctacatacaagagaaaacatgcgataattgtcttttagggtttaggtcacttcattcaagatgattatttttagctccattcatttgcctgtaaatttcacttttaattgatttttaaaagtttttattcattttacatacaaaccattgttcctcttccctcccatccccccattcactcctcagagagggcaaggcctccaatggggagtcaactaagcctggcatatcaagttgagacaggaccaagttcctctccactgcatcaaggctgagcaaggtatcctgccattgggaatgggcttcaaaaagctagctcgtgcaccagagataaatactggttccacttccaggagccccttcaaacagaccaagtcacaaactttagcccacattcagagggcctagttcaatctcatgcaggttccccagctgtcagtccagagtccatgagctctcactagctctggtcagctgtctctgtgggtttccccatcatgatcttggacccccattgttcatatgatccttcctccctctcttcagctgaactccaggagctcatcccagtgcttggctgtggatctctatctgcctccattggtttactggatgaaggttctatgatgacaattagggtagtcaccaatctaattccaggagaaggccagttcaggcaccttctctactatttctagaattcttaactggggtcatccttttggattcctgggaacttccctagggtttctccctaacccattatggctccctctatcaagaaatctctttcattgttctccctctctgtccctccccaacttaattcctcatgctcccattctcatcccatccccttatacccccctcccagtttacccaggagctcttaactattacttcttcctggggctccccatgtgtgtctttcttagggtcctcctttttacatagcttctctgaggttgtggattgtagcctgtttacactttgctttacatctaatacctacttatgagtgagtacatatagtgtctgtctttctgggtctgggttacctcattcaagatgatgtttttctagttccattcatttacctgcaaatttcatgatgctattgtttttttactgctgagtaacactctgttgtggtgataccttgtttgtacaaatacagcctgtctgaagatcagagggtggagattcccagtagttaacagacagacaggaagtgagatgactggacagagaaaggattagaggcaggagtaaacagtatctcactattttcagctggaaagttggtgaggtaaggtgtggctgtggtgtgcttcttcatctctctgatcgttcagcttttgcccctcatctgactctgggcttttattattaagacctattataactcttgttacactccattgtgtaaatgtaccacatttttctttatccattcttcagtacagaggcatctaggttgtttacaggttctggctattatgaattatgctgcaatgagcatcgttgagcaagtgtccttatggtacaattgagcatatattgggtatataaccaagaggatattgctgggatttgaggtagattgattccccattttctgagaaatcaccatactgatttccagagtggctctacaagttttcactcccaccagcaatggaggagtgttccccttactctacatccacgctaatataagcttttttttttatcttagccattccaacaggtgtaagatgatttttgagttatttgatttgcatttccctgatgactaaggatgttgagcaattccttaaatgtctttcatccacttgagattcttctgtttagaattctctcatttgcatacgtgtatcacattttcattatctgtttgctggttgatgggtatgtagtctgtttccaatttctggctattatgaatatagtacgtcctcatgatgctctggatttccttggtttctgttgtaatatcctcttttcatatctaattttttcttttggttaacttggctaatgttttaccaatcttgttgattttcacaaagaaccaattcttcatttcttttgtttgttttgtttttatttatttgtttctgtctcattgatttcacccctgagtctgattatttatttctatctactcttttgggtattatttctttttgttgttctagagcctcaggtgtgtcctcaagtggccagtatgaaatctctccagtttttttttaatgtaggcttttagtgctgtgaacttgcctattattataactgccctcatcgtcttccaaagatttgggtatgttgggtttccattttcattcagttctaaaatgtttttaattttcttcttgatttctgtcttgacccaatttccttctagagtgaatttgtatactttttgtttcttttgttgttgttatccagctttaatttatggtggtcagaaaggatgcagagtgttgtttcagttttcttgtatgttaatacttttctgtgtctaaataggtggtcaattttggagaaagttccatgaactacttaaaagaaactatattctttggtgtttgggtggaatgttccatattaggtctctgttaagtccatttggtttatgccattatttaactcttgtatttcttggtttagtttttgtctggctgactgtccacttatattaaagtctcttgccatcactatgtgaggaacaatatatggtgttttttttatggacttggctgtcattatgttatgaacattaatgtttagaattacgatatctttttgtctctatctcttttgagtaattttggtttgatatctatttctccaaatgtaaaatggggacaactgcttgcttcatgggtccatttgcttggaatacatttttccattcttttaccttaaggtgatgtatatccttgatgctgaagtgtctttctttgatcagaaaaagatggatcctgttttctaatacaatctgtcagtatgtctctttatcttggggggggggaattgagaccattaatattgagttatcaatgagctaaacattattgatttctgttttgttgttattgtatggatttccccctcctcttttgattcagtgttcagggattatttatttctgtgtcctcttaggtatatttaaccaaaatttcccttctagtgactactgtagagatgaatttgtagataaatcctgcttaaatttgttttttaattataaggggtctttctttcttcatctgttttgattgacagttttgctggttatagtagtctgagctggcatctgctgtctcttgagtttgtagagatctgtctaggcccttctggcattcagaatttccattgaaaagtcaggtgttattctaatgtgactgccttcatatgtaatttggtctttctcactttcacaatatcctttctttgttttgagcatttagtatttagctattatgtgttgtagggaatattgtttctcatcttatatgatgttcatttgtacctcaataggcttttctttctttgattggagaaactattttttaaaactttattctgtgccttcgacctatgtttcttctctttcttctaccctattatgcataggtttggtctttttttatagtgtcccagattttctgaatgtttactgcccaaatttctttttagatttaacattttctttgaatgagatatctttttcttctgctttgtctacaggacctggaaatctcccatgccttgtaatgtgttgatgagcttatctctgaggtttttatttgacatgctaagttttcatttccatttttttatttcagtttgagttttctttaatgattctatttctttatgaattatactttcatgtcttggaatgttttcattatttcattcagcagtgtgcattttcatgaccttattaaggcactgaatattatctttgaagtccttgaataaatgtgtaattgttatttcagagtacttgtcttatgcttcagctgcactgcttttctcttatcctattgcagtagggttgttgtcttcttgaagagacatattgtcttggttgttaatgtttgtatttttttgtcctgggatctaagcgtctgtcgctatatttgaggtgtttcttgatgtaggtctctggtcttgtctttgttgggtggatgttctattcttttgttgtcattgcccactttggatcataggcaaatgtgatggctggctgtgtggtacctggcagagaatgtctcttcaggtctttaaatgatataaaggaatggagatgggctagaagtcaaggttgagaggggcagcaagaaagaactcgtgggatcctgggtccacaccaagaggcagagtccccaaggaatggaagtggaatgggaggtgggctcatggagggtacagcaggattaaaataaagtctgggaatactgggatgaaatagctgatgatttttcaatagagaactttttacaatgtctttgttttatctgatgatttttttttttggcaatgatgcaaaaaaacttcatccttgattaaaagtactatttaacaggcttaaataaaacagccttcattactggtcaaagagctaagatctcatctttattccagaggtgacatgctgctcatgtagaccatgaaaagcatttgggcaataactagatttccatgttctgttctcttattcacccagaggatttgaaaataaacaaaaagtaattgaaaagaactggccacaagtttgagggtggagaaactgtctggaaagagggtgaaggtagtgagcacatctgaaagagtggattttcagttagggccttaagggtataacttagggaatgtgagtgttccttgcaggttgggttttcacacatacttgccaaaagagtacaggctagaaacttctggaagcagcttgtgtcatcagagggaaaaacttgacttgggaattatttgtacttccttcagaggagtcagtttttccaggccctataggaaccaagaagaacaaccagtggaggagtttctgcacactgagcaggatgctggctccccttaagtgtgtaatgtatggggatgtcatacgtagacctccccaatccctctaacctgttacacagactttgtgtctaatgagttttcttaaatgcagcatacatgggtgagtttattctggaaatttagaaatgggggatctttaaaaaaattgactctaaagaaaacaggaaatatttatgatattttgaaatgagcttcttgtaaacatttgattttgaaaaaataatatcacttgactcaagctatactttattatgcaaatcaaatggaaattgtagtgattatcctgtgagtttgtgctgtgttaatttagctatctcatgcatcaaattgccaatctccagtttgatatatatatatatatatatatatatatatatatatatatacttttgaacatatggaagtgcttttatgaattgtgcttatatcaggttataatgtgattcttcacattaagatggtttaggattacatttggctatgagcatccacccagaaatcaacaaagactgttcatataagattttattttctcacgtaaaaagtctggggatagcagacaagaactagtatggaagtgtcacagatggtcccaagagatctttcctcatagctttcttctctgttctctgcgattacttggttaagatccagaatggctgctggataccaattacaacacttaccttctgtgtagtgggaacaggaatataaaaggttttcccaggaagctgtgtaaatgacttccactaatgcagtgtataaactgtataaatgtgaagggaggctagaaaatgtagtccatagcaccatgagtccagcagaaatggagattctactattcaagaggaagaagcaagacctaatgtcagtaggtaacatttgcctcacttacacaggagctttgagtaggctctgtgtccagatagcttctttacctctttgtccaccacttgccatattctaactctggtgtgcagtcttggtgaaacttcccatgccaagaaacacctttgcttcatatagccctcagaggactggaaagttaatttttaaaatcttataccatcaaacaaaatgatgacttctaactcacccacaagagacttttaaagatttcttcttttgttacaatatacaaggcctaaactaggtttccttgttcctgacttgtgagcaggaaaatccaagaacaaaaaccaaaaaccaaaaaacaagataatggcatatggattagagaagagaaagtaatgttggggaggtcatgtgattcaggaggttgtggttttctgagatcagtggtcagggaagccaagaacttagagagccatggcctagatcggaggaccaaaaccagagacactggttaaaattgccttgagtagctacagcagagcccgtgataaccaaaatttacagaagcctttggctatagctatgataatcttgcagtgaaagattaaggtttcccaagattggctcccccgccccactctttttaaacaatgatttttataaacaagcttgtattattttgtttatgatctaacaaataaagcttgcctgaagatcagagtgcaaagctagccacactagtcaatctagttagcaatagaggccgttcggtggtggtgtacacctttaataccagcactagagaggaatataagatgggaggagacaggagtcagtcagtctgcagtcatgtggaggacaggatcaccccagccttggtaggggtaagaactctctaatggttggctgctttgcttttctgatcttcagcttgaaccccaatatctgtctctgggtttttattatttgtgctacacaaattctttgcggtataatgtattctggagtttgactggttgtcttgggaaatctagtcttctgggttaggaaaataaggtaataaattcttggtgataaattctgtttctctgttcagggcctccagagtcctgatcatctaagtttctatggtaacaatactgaatccttagctcaccatagtcttccagatcttaggaacaagaacttccatttctaaggtcctctagatgctgctcaccatgcttctgcacatggtctaactatgtcttataattttcagatgatcccccatagtaataattgattgatgagccatgaattactctttggtagagaatggacaacatggaacatgatgataatgatttttgagaccttgaagacctttagggtttctttagggaagataaaaaatatgccaaccctgaaagtgttaaaaagtggagaacttggaagagttagtacctagttgaatgagcacttccaattttatgggagaaacaaatttattatttgccaacaacaaacaggaattgctattttcggatacttatgatggaatattagctatgagttattttttatgtttgaaatgtcaactgagtcagtaattaaaatcagaatatgccttagtagggaaatattttagtgcctgaccttgctggtgattaattaatttttcttgcttgtggcttctatttctccagaggtgcatgtcagaaagccatgaccagatgtctcaggctttgttaaacaaagacttggtgaaaagtaagaaaaaggccttaataaacaaggaaacaatatgccctgggattttggaaaggtattcattgtctcttcttttgcttgtagaacctaaatttcaggaagggttttttttttttttttgctattattttttttatttgaattagaaacaagactgttttacatgtcaatcccagttccctctccctcccctgccaccccctcaactaaaaccatacctatcacatacactttctgatccccagggagggtgaggtcttccatagggtgtcatcagagtctgtcatatcctttgagatagggcctaggccctcccccatgtgtctgtactcagggagtatccctctaggtggattgggctcccaaagtctacacctatgctagggttaagtactgaactattacaggaggtcccgtagatttctgaggtctcctcaccgaaacccacgttcctggggtctggatcagtcccatgctggtatctcagctatcagtctggcgaccaagagctccccgttgttcatgtcagctgtttctgtgggtttcaccagcctggtctggacccctttgctcatcactcgttcttcttaggaagggtttatattcactggaaagaggcaagtagtcccagccatgtgccaagaactgggtcacaaatgttttgctttctgtttattctctaccttgtttgcaaaaggattttttcacccaccatcatttgccaatggaggttttatttattcaaggttcaactaaaactcacattttgttgatatagtcttctggctcagggtgcctattgtttgggtttgagcctcacttgtaaaatttacttataaaacttatttggcatctatgatcttgtttgtacctgtataaatgggaattatttaaatgcttacttcagagggctgttaaaagtttagaagaaagtctgaaacatgcctagaagtattgcttgcctgtcagaattaggtaagttgtcattgatcaagattagttgctctgctgttcttgcagtctgcatatttttaagtctgattcgtggggcattgcaggtatttctttgtgtgtatttctccataaagagtcagagtccttgagggtagcagctatgtatagccacacctgctgccctacaccagccaaaatgcctctccagagaagtacatagagtaatctttgttttattctgtaattattggaaagttcatttcaaagtaatgacaaaatattaaaatctcttggcttattttagtttttaaagtatataaataccacaaactttaaaaaatttttctagaagccattgacgtcaaattagttctgaatagctttgaaatgtcaaatgtggaagtctgatgtatttcttaaaagacactgtcttgcttacagggatcctcagttgcctcccatcggctttcgggatgcttttatgggatccccaccagatcagagaaaaccgtaagttgtccctaaactgctgctgaatgtacaaaatgttgattcaacagctttgtttactgaagtcaggaatgtcccaaggtcaccaaaatgtcctttacatgacgttttactttcctttaacagaagacttttgtacataaagaggacatcaattagaaagcatcaattaacaataatgaccacaacaaataaaacagcttggactagtgaattcttctactctctaacattcacttgcaatctttaaatgatggcaggattgcacatgcttgttttgccagcacttgggattctgcggtgcatgtgttatgagttccaggacagtttgggttacatagtgagacttttctcagaaacagacaaacactcactgcaaaaacaaaacaaaacaaaaatgcaaagctgttgtgggaattctttcagccaatagtctttgaggactggccccttggggcagtgctcatgcatggactgggagcaggtgcttgcatgctcttgggtagtgatcagaattggatgacagcatccagtggctaagggcagaagacctcagtggttctccactttgctttgtcatttgtgagtgatttccccaataaatacctaatttcctttatctgggctttcatgaactctattacaattgtcaattacattttggtgcccaatgtgggacctgaatccatgaccttgatattaagagtctaatgctctactgactgagctagccaggcaagggactcagattctgaaataattcctgcaacacaaagctgatgaaatcatctttggcatgagtgagaatcaagtcacctttgtacacccttctagctgaggtaataaaggatgatctgtgttgctgttagagcttttacactataaatgtgtgtcctttccatagattgctaaatgttgtgctttgctaacttttatgcaatctgtcagtctcattacaaatgcttcctaaatgtaaagccggggaggtgttttccttttaattgcaagagagctgtggtgtgcctttggagggaaggaaatccaggcatgaaggaaacttcattcaggcaagagttacagagtaattggtggttaaattcaaggtacctgaaccacatatatattctaaataagatttccttaaacagagacactcaaaataaggttgtgtgttgatcagttggtcaaatataaccagaggcttatagggacttcatttacacctgtaatcttggcaattgtgagactgaggcaagaggattgcatgtttcagaccatctggactacacaataaggctccttctctaagaaaactggataaaacaaaaccaaaacacaccagagtaccggaggcttgcaggaacctggcctcatgtctcctctcatgatggttcagtattttctaattcggtgtttgggtgtttgtggcagtgtcctagagcatgacagtgaacagtgagaatccactgtacagcaagcaagacatggatatttttatgggtaaagaaatgtttttatttgaggttattgaaaattttctgcaccccaataagcttctctattgacacagcaatctaaatccgaccaaatcaaactgaattagaaaaaaagcccacatttagtggatacaatgttctcagatgattttccagcccctcagagaggagatgggaaagagagactgaaaaactactttttctgggggaccctgtgggagtggtcttgagtatctctcggggaaggggatcatcattaggtgggctttctgagatgaggcagggattggagagagattgaggagggggctggggtgaaacttctaccagaacattccagactctttgggtagatggatgccaggggtggggttgaagcttctgccagaacagccatgatcatgatgagattctaagtgtccagttatgtattacaggactcaccatggtagctgacgtgggcctcatgtccactctgctggatgctttgctctataaattttcttgaaatcaggagcattttgggatttatctctccccttctgtgctctagtctgcaaagccattatttggatgtggagttgcttgtctgggttctctgattttcttggccttttctctctcttactttttcttttgttttgtaacaccttctgtcctttcttttgaattcaccttttgtttcccaagttcatgcccacaggatttttttttctgcatctggaataactatttttcttgatttttcttcctcctgcacaatgttctgttttctccgagaggatttccttttctttccccagtttttcacttgtgaggtgtctatctatcctggaggcatgtttctaggctggtaatcagtctttggtcatttatagacatgatcagtggtgggatgcaaagccgtgagactttctggcatggagcttcacaggaagggactatgcagatcactctttcaaatcagtcagatctctggtggaggctcccagtcttgaggctcccagtctttcaggtgatgagtgaaaggcctttgtccttgaagcaaaggtaatcatgctgggacatcattactaagtccaccctttaaagtcataggattatactgttggtaaaagactttctcctttctcctttctagtgagtgggtcttctgctgaggagggatgggccagttaccctacagtgacttgggagggaggcagggattaaattttaccactgaacaaatatttcctcccaactcctattgctgacttcagattaacttttccaagccaggtccctctttttttgagtgcttaaaggttgtctctcccgtttcttctgctttctgtgttcttgtgggctctaatttctaaaatgttctaaaaataaaaattttaaagtatttttcatttaaagtgtttttcatttgttgtcaagtgtttttcatttgtcattataataaaattgcatcatctccccttctctttctccctcagacccttccatgtacccctcttgctccttttcaaattcataacctctttttcattaattgctataacctgtatacatatatgtatacatttttacacatgtgtatatatgtatgtatatatatatgcatttgtgtatgcatatacacatatatttatgtatttaggaatacatatttaggaggttttaatggagtctttgaggaaggaggattgatgtgcatgtccgattcttaagtcatgcaatcttttcctgaaaaccttcttacactgtccccctcattcccatgacctggttcggtccctcctgttggatatccatagcactgcaaacctcttctgtctaagcattattcatctttgtgtgtaatgatttggaaatcccatctttctgagttccatgctctgaagagcaaggctgccacatctccattcccttggattctgcaatgtggagagcctgatatgctgtagctgtaacacagttatatcttcagcaaattgtttatttctaatgttcaactgcaaaaaggaatgccaaattcctattttatttgatttagggattcaaggcctgtggatccaaatgttttcaattttagtaagtgcttttgaagaccagtcttttagaaatcaacacttactagtttgaattgcaagaattacttgtttgtgtaatttggtttgtgagtatgagcaaggaaataaacatatgtgcagctccatccctcttcaactaattccatatgtaattcttcctttcactgaacgtgtattaattacaggatgccacacagtagaatcgtgtggtagtttgaaatcttctctcttgaatattaaaatttcttttgctgtttgctagctgtacagctgtggaagttaaatgtcaactttaaaaggcaatgaataagaatgagtttgctcaatggaccaaaataatgtgcctcagcttataaaagtaaagctgtattcataatataaatttaaacttcatgttaccacttcagggaaaaaaatagaaagtgggatagccttactatttgggatccattgttactttaatttctagataacatcatttctgttgtaatggtgttggactgtccacttcattttctcataactcaaccagtggctactatatcactttgcaccaatatgaaggaaacactatttattcataaattggtaacggataccttagtgaaacactttgacactactgactttaaccagggaaataggctccataataatgtcttcttcacatgccgtggactaaggcaaaggggggaaattgtactagataaatgtggtggctagtcttgatttctccatttgatggcatctggaatcaactaaaacaaacttctgagcacttgtgtgagagattttcttgatcagattatttaaagcaggaagacccacgctaaattgtgaacagcacctgccagtgactgcccttcattgatgtgagaacagtatctttggggttccaatgtagatcaaaactgagcatctctctaggaatgttccaggccttgagctccatattgggaccactgggacatccagctttatatattgagcaactacccaattcttgccctctccagtgtgagacaaccattgctgaactacccagatcacatcctgtaaaacaatctaataactccccctttaacatatatatttcttctgtcagttctgctcccttagaggaccctgagtacaagaaagcagttagatagaaattaaaatttatatcaaagagataaacccaaaaagacatttgtggacttgaaggctgaattagctagtgtttcccttgagatgcagctatatgtcttcttatcagtgagttccccaagcattggccatggttggtgataggagtttggaaaaccaaggatgctcaaaactctgttataaaccaacagcactcttttgcttttggttgttgagatacatcttgaatacatattactgttactccttgtatatagacagacaaggtgaagacagtggtgggaggcacagttccttaagacacacacacaggcaagagaatggaggcatgtgtctaccattctagtttaagtttttctttgccttttcaccttattctcaagcctcgaaagtaagttgaacttaattgagaagtgctatttatgggaaattaatgtacctgtaagtgggtccttgactatctgattatctaatacaaactcattttatgtgaaggtcttagttatcagaagcagtgtgtgtgtgtgtgtgtgtgtgtgtgtgtgtgtgtgtgtgtgtgtgtgtgtgtttacatacacatacatatctacatacacacaactatgtatggtcttgtgatgagaggccataagagaaatcagggctgcctgcctatttccttccttccttccttcctcccttccttccttccttcttttttgagttgggaaattatgttctgacacaggctatttgtagaatgaaaagcatgtccacaggagctggtgttagcctgagaaaaacccagtactcagcacccaaacctgggtggagaaatgcccaaggaagactttgcataaggtcagctctgagtcctacatcttgtcattgttatcaaatttcattgcctcccatggtagtgattggggcatatttgttgacattttataacaaataagttgttttcagaatgcagatgaaaagttaacagtgtattggtcactgggtagcttttgacactaaatgagaaagagcacagtttgggaaaacagggaatcgggacatctgggcctgcacagaactgactaggtgaccttgctctcagctaataatcctccctggcttccatctggaacatgagggattgaacctaatgatctgtaacatcctttttctgcactaattaatggctagaaggggaaaggtatctaaatagacaaattaaatgagaccaaaaggtagttgaggcagttaagtggccattgttggaagagagcccctctctatgtgtgtgaagtggtctcctcacagtagcagtagtaagcttgggccatagtttaactgcttgaaattcattcctctcacgggtcaccagcatttctaaaacctgccacacactgcagagggaaaagggactgcatataaatcgcacgagtgtttttgttctcttcatcttttcctttctgcaagtatgaggcaaggcatttatttcttctctacttcttgtgatgacttggctcttggtgaaatactatctagttgctgaacatatttcaagaaggaaaacactgtgaaagcaacgtccctgtgaggatgtggagtaaataataataaactgtgacaaggagagtgggggtggggaagagaacacggaatagaagggaaatagatctgaactccattcttgattccatcttttgtaggactgttggcttctgcgggtttaggattgttttttttggggggggcaccatccttgcttcattgtaattcaggtaggccatgtgacagccaggctgattctgtccattccaccctccccacaagcccaggtgttggtcacatgatccagacttggacctttggagagcatgctatgatagtaaacagactttgcgggggggggggggcaatgcctgtttcagtttcaaatcagccactttattatctctgatcatttggtggggtgattgggctcagctagggtttctgttccatgtgataacagaaccattttgctatccatggtggatctcttccagtcttggtattcttatcgtgtaagaactcagctggagatgtcaatacagtgtgttgtcacctctgtgcatcttgagtttcactgtgtatcagctggagtccaagaatcagaatgcagaaactaccagttttctgaaggtctccactggaaagtttggaatctcacttctgcagtactgtttgtcacaaccatcacaaagccatctcagcagtagaaaagaagcacatgaagagagagacagatttactgcagccagggcacaggctggcaacctcagaggtaatcaagtgttaggagccaaagatctcagggcttggcatgagatcgtagaccatgcttggctggccacatagttatatattaacttttacatagcagctccttagaacctcagctcaagaaaagaaacaacttgacacagtcctccacccgcaggctcagtcacctaggcaacccttcctggacctcttactcataaactctttaccctgccaaacatcctctcttcgtggcttcctaatatcctgcctacactaacacctggtgcacaaacaacctattctacctctccccatatcctgctctgctgactatataagctagcctgagaaaaataaagtttgccacttgatcagaatcttgtcttgtggttgctctttctgcatctcttgaccccattccctatccctgactctcttgccccaggttgacaccctatgggtcgggacaatcaaggatgcctaactttaccatacttgattgcctcattgagcatatctggaaacccaagaagcccaactttgttgatgcaacttgaaaagctactgtaatagactcaggtgtagacaataaacagagaacaaagggcagtgtgaatcagccattggtcaactgttacatcatacctcaagagccaagcgacactgtatcacatttttaaaatcaaattatttgagttacaatgcattgatagtaaatggaacaagatattactaggtgctaaaactactagtctttgccagggtacacaacccaaattcgaggtcaaatcaggacttgtgccactactccaagtacttagttgactctgaagtcatttcatcaaattcagccaactagagaggtaccgtcactcagtactgcaagcaacgcactccaggtccagaaagatgttaacatgatccttgcctcacaggggcactatcaggctagagtctatgcatgtctgaatagccagtatccccacttgtttaaaaatgaaaagctttatttgacatttagaaactcgatactcacaacatttaattttatatgttaatttgactgggcaactggatacacagagagttagtaaaacattatttctgtgtatgtaggtggggtgcctatgaaaaaaatagcatttgaattgggtgaaggatgctccccattcatatgagcatgcatcctccagtccatggacagtcccaacagaaaaaaaccagaaggaacagatctgttctccttgtgctaggatgtcatagtctcccatccttggacaccagagctccttgttctcaggactttgggtgctgaacttatatgccatccctacaccaagttcacatgcctgctgatgcctctctgtatgcaaattgcaccaatagctttttggggtctgtggcttgcagagagcctccatgtcagccaattcctgaaataaaatatcctcatacacaaacagtgcccctgggctcagggcctggacttcacaaatgtaagaattattatctccatgtttacaaaagaaagtgatgcacagagaactaaactatatgtcaaaattctagttctatctttcttctgaataataaaacatctcagaccctaagttttggtgttaataaatttttattatacctgttattttgtgtgtgtggtgggtgtgctcacatgccatggcatgtttgtggacatccagggacaacttttggaattcagttttctctttccattaagtgtattctggggtttgaactgacttggtggcaagtgcccttatttgctgagtcatctcaccaacatctaaacatcttagctcaaatccttgcttgttattaagtaccatcatgagagtttggatgtattactttagtctctgtgcatatgttttactctattcagaatgtaaatgatgaaattaatttaaagagctcttaggagtaatgaattaacatatacaaaaccactggaataatttcatgcataactagctatttggaagcatttgcttttattagctttactctcatatttacaagctattggagccgaactcaagtttgaatgattaaggggaatactagcatatacaacagggtgtttctagaactcttgttttgacatacagatagctcttcctctaaaacagaatgttgcagaagtgagattccaaactttccagtggagaccttcaaaaaactggctgtttctgctttcttattcttggactcctgttgatatactgtgaaatttaagttgctgatactgagaaacttaagttgcatggggcagtcatacagaggtgacaacacactgtattaacatctccagctgagttcttatatgataagaataactaccaaaagtggaagtgagccttcttggatagcaggagtggttctgttatcacatggaacagaaaccccaactgagcccattcactccaccggatgatcagagataataaaaaggggctaatttgcactaccacctttcaatctatggaaatagacaattgagatactcttcacctatctaggtaccatgtttatgtggttatttcttccaatattcaacctataattttatagtatagtttcatcattgctaagtagagatgcagtaggtcaaatattggagactcataatctagttaagtaggtgagagaatctggaaactctgaaaatccccgaagaaagtataggagaaaaactccttgacttcagtcttgacaataacttcaggacataaaggcacaagtaccagaggaaaaaatacataaatgattcttcatcaaactaaaaagcttatgcacagccaaataaataactagcaagatgaaaagcaacttacatatcagaagaaagtgtttgtaagtcatatctgacatagagttagtatcccaaatcaacaataaacccttttatcacttaaaagtgggccaagaatttcaatagccatttttctaaagaagacatactgacagacaataggtacatgagaaagtactcagtgtgcctaatcagggaaacatagatcaagccagggcctgaagatccagtcagtaaagtgcttacataagtacctggagttgatctctagcacccatgtaaaaagctgggtatggctccaaatgctttataatctcagtgctgaggaggcagagacagaaagacccctggagctcattggtcagtgacaggagaacccctgaaactcattggctagccagctagcttaatgagtgagaccctatctcaacaaacagggtggcttactcctgaggaacaaagcctatggttgacatctggcttccatatgtacatgcacacaaaatcaaaaccacaatgaagcacctcctcattcctgttaagatggatattatcaaagtgacaaaaatgacaaatatgggtatgcatggggagaaactggaacctttacattcttctgggtatgtaaagtacaaaggctattgtgaaaaatagtgtggaaatcactccaaaatttttgaatggaactgtcttatgatgtggtgtccccacttttatgtatatatccaaagaaaatgaattgataacctacagaggaatctatacactggattttatttcagcataattcacaatgaacaaaaacatagaatcaacccaagaatccttagattggtaaatagatgttttgagaacatagatgaaataaaagagcatcctgttaagcaaacgatacatacaaaagtagtgcagtatctcatttatatgtggaatctaaaaggttgaattcatatgagcagttgtagaatggtgtttactaggtgctgggaggtggaataaatgaaacaatgttgatcaaagggtacaaaatttccaaactgaagaatgaacagaacccagagattcattgtactgttagatattgtagttaatacttcaggatttgcatgtgtgtaatttaccaagagagtaagtaggtcatgagtttgcacaccacagaaacaaaagacaacagtgggaagatattttgtaaatttgactgtattaataaagttactctatttgaggatagtaaaccatcacaccacacaccagaaacataagcaatctttgttaaaacagcaaccacaacaaagtcaagaggagtggtaaaggttttcaacttgtcacaatgagggagttcacacaagtctatcatttccttatgtctcatgccagagttccaggtagaggtgacacctgagcttccagatcaatggaataaaaagataatgtaagaaaagcatataggctcccactttccctgcctatgttggggtgagcctactgtcataaattatatagttgtcatttacaaggtatttataatcacttgaagtctttagctggtctcagaggatagtaacatctttgaggcagagatacagtttaaacaaagtaaggactttctagaattacagaaaactttgctgctgtctatatttgagtctgtgcttttcatttacacgaacacttaaatatgggtgctttattctttcaaatggcttccaaattactaggcttgaggaaattcttccaacatacccatttgatgactgtctgctgtgcaccaggaaaaaaaattgactttggtagtatagatgcaaaggacagtgtcatttgtctgatatctaaggcagggaacacaatcagttctggtgtattggtaagacagagactcagctaaaagtaatagaagacttagctaatagttcctgggtaattaaaagatacatttgaccaactctcatgaactcttaagagcaaagaatccgggactaggatggtgttaagcaatgttttaagggacccgagattagctacttttcatctttgtagtctcagggtggttcctacgttgcaatcataaagctgctatagaagggacaaagagaagagctaaagggaatccctctctagaatcttcatcccacacctcatgacagactctggtagggtcacctgggctgcagtattgttttaggcttctaggtggagaaaagcaagaagagggcaggctggaatagtgttgaatggaccaaactgcaaggtgttgcatgtagggagtgaacacaagatgtaagggagctgtgtaactcggactgggaagattaagagaggctcccagatagaagagacacctaatctgctagaccaatgggagaaaaggccattcttcagcagaggacataggacatttagagacaaaatgagcagggcccatcctggggtgagtttgccttcatgacagctgagctagcagtgcctgaagaatgtgaagaatttgggtttgatcatgtcagtaatgggaaaggttttcaagcacagggaagacatcgggtatttacttttgggaaagcacaaaactggtagacaactgaggctgctaccatgagactcttgaatgttcaagggaagacagaataagatccagctcttcggcaatgacagtgtagcaggagagaaggatgcagctttttgatgcattgagaaaatttactgggtcactggttaattatgggagtgaggtggtttcaggttggttcctagcctccctgcttagacatccagagggggatgaggccattcactgagacagcatcagagactggagaacagacagatccagccccacttgctaaatcagtatcgaagctgatcatctttgcccagtcttgtcccttccacccattctccaccttaaggctggatactctcttttaagacaatgagacaataatatcattgcagtatactttagatcctgcaactattctcactagaaaggactagctttccaaagaacagaaagagacttggaaaacagtagaacttggatttgattttgtctggtccagttaatggcagagtatttcatccatcagtactttggtttcatgcttcattatgtataccataccttgtccttcagaacttccacaggttttgtctgcattctgtcctccctaactgtcatccaaggtcatttgggtgaggttgttcttatctgtgtagaggaataaattaaagcacaggaataagtaatctgattccttattaattaatccacttatctttttatacgtatttatggaataaatgtgaatgggaggtgctaagatacagagtgcttaagtgactgtctgaatgttccagaatgacttaagggcaaagcagaaaggagaaaatttggatcctatcactaattttaactaatgccatggctctaatgataaataccagacttgcacatctcagaaagtatctcagaaaattattctctgcacctgttaaaggtcaatgagggtatgcatggcaaattgtgggtggtactggatgagaaccagctctccaccttccagacaacctgatagtgtagcattgtcctcatgaatgtgccagcatctggtgttcagttttacatttccaaagaggccgtttttatctgtgcttcagcatttatctgactcatggagactgactagagctcaataaattctgtctctttttccctttctcctcctcccccactctctctcacacacacaccacacccacatacacacagacaccacacccttcacacacacacacacacacacacacacacacacatccaaaattctaactgtttgatttataatgagaaataaaaatgtcaagcacaccagacagcccaatgaaagcttctccctctgtggaagccatatgggaagccagcttttgatcagaatgtttggactcagagcaaggagaatggttacatgagtgcagcaatgaatggttacagactctgcattgggcctcttgccgctgtaggtaacagagacataaggttatcattgccaaagagtaagtttgttaataaaagaccccaatggcacaactgcaaagtctgtgggagagcctgcagtcaggactctaatcctgcagcattgtcttccagagttggagacgtgacattctgtggctcctatcacagaagagtgactggcttttttctatcagtttctactaagggaaatccctaatagtgtgggcatgggtctgactttgggcctattagctctggatagggagggggaaggcagggcggatccatgaggcacagtcacgcctccagtgtttcccaagcatgacttcaagtcactataggctgccattgagtctgattagaatatgggccctgaggtcctccagcaatactctagacctgacagatctacctataaccccaggttcacaggattcatggacactggtaaggatgaagagcatatgaatactcattctttcacaccttcataaacattacaaaggtttcaaagtagtaatctaatggtactgcattgttgtttcattttgcatttcaccaattactggatttatggctaaatttattgtctaacagcaatgagacttcctgatttcttttgcaaattatctgtgtgtagcctcagtcaattttcctttgggatttttttttaaccattgatttacaagagtttaaaattttatattaattctgtcttgataaaatgtatgcaaatatcttctgtaactttccttgtaactttacgtagggcattgtttggccagtagaagtaaagacataaaatatgaaatatcaaacttatatgttgccactctttgctagtacatgggtaagccacttcgtataatcatcttgtatctaacaaccttcttgggacttgcttggtgcattttgtggcttctcttggattttttaatcttttcaactttgggaaataaaattttgcattcccactcaattattgtaggacagtcatatttttgtttcattttctaggctctacggtacatcttagaagctatgtatctcttatataatacctatgcaccacttgtaataagactagctggttgttgcagcatctttttgttcaatgttttgttgttaattcttttctatcatagctgcacagccatgcttaagcagcttgatttctgagatctggactctaccctgctggcttctttgtatactcctgaagcaacagcactcattgtcttaattattataacttcatactgctcctttgtacctagatggagtaagtttcaccagttcattcttcttttccaaattctcatcattccatttggcattttatggaattctatgtctattaaatattttttgccaagttccatgaaataccttgtgttttgattcatgacatttaattagttaaatggaacagtgatcatcaccagtgattcatctcattcataagtaagggattattctataggcaacaaaatgtgtgtttccctttgtatatgtattatacagttttggttatgtgcattctaggaaacttagagaatgagctttccacttacatgttgccactctttgcttgctagtacaaggtacaagggtaaactacttcatataatgatcttgtatctgacaactatttggggacttgtttggtacattttttggattctcttgaaatttttaatctggataaaaattttgcatttcccctcagctattgtagggcacccattttctgtttcatttcctaggctctgcagtgcatctttaagtagaaaggctgatgggaggactcagtcagtggttgggagcatttctggaggaaagaatattatagagcttaattttgattcccaatgttttcagggtactaatgttacctatttccacttcttttaattatgttggattttcctggactagtggcaatcacaggtaaacccacccaggtaatcctactgagggaaatgagaagtgtgggacgtttgctcattatcttagttcaagagtgccatcttctgctagaccattgaagcaacgtgtaattgacattgggggtggagtgagaagcatcacctgctgatcctgtgatgctcttacagttccaggatccttagtttctggtgtttagtttctcaactcttttgactctcttagttgcttctctctgtttcagaaatagtgccttccccaaactgtcattctggtccttcctgcttgaaaactctggttcaaatcctctgatctcagtatctcccccatcagggtaggatgatgtttctggagttgatgtccatggtgctctgtgtaaccacaggcagttgttaccttatgccctgtgatccctgtccacactgtggtccagtgtgggctttgatctagctctgtggacaggattgttaaaacccatctgaacacaatttgaaacttatagagtcaaaatcagtattattacaaatgtaaaggttccatctggcttttgtttacaattctcggatcagaaaatacctcatcctatgaaataaaatagtgttctgttgagctgagtggacagattgttttgacagggagtgctgaaaacagaaacaaaggaattggctgcttttgttttttttctttgtaaaggtaaaatgggctgggtcccacatctccttgaaatatcacataagcaatttagctggggctggatggcatggaatttagcatgaacagttccatattgatttgatctgttgtgtctggtgcctatgaatttatttcaagtagtatattccatgctccactatgttctccttagagacaagtgtgtaacttaattctctttgttgttaacctgtctttgtttgaggtttttggaggatacaggcaaatttaggatttggtggaaggatgttttacagtcttcctctgtgactgtagattcccagttatcattgggaattctgcctttctctgcattatatatcttatatatttcgattcttatgcattttattggtgagttgctctttcaattatgagtaatggtccctacaagtattggtttttaaaattttgtctttttttagtttttattttaattagaaagaagattattttacatgtgaatcccaggtccctctgccttccccctcccctgcccccccccaactaataccctacctatcccataccctatttgctccccagggaggatgaggccttctatagggggtcttcacagtctgtcatatcctttgggatagggcctaggccaacccccttgtgtctaggctcagggagtatccctccatgtgggatgggctcctagagtccattcctatgctagggataagtactgatttactacaaggggccccatagattaccaaggtctcctcactcacacctacattcagggggtctgggtgagtcccatgctggtttcccagctatcagtctggggaccaagagctcaaatggatggaactagaagaaaccattctgagtgaggtaacccagtcacaaaaaagacaaacatggtatgtactcacttatatgtggattttagacataaaggattaccagcctacaatccacactgccagagaaactagtaaacaaggaggaccctaaaagagacaaacattgttccctggagaaggggaaagggtcatgatcccctgagcaaattgagagtatgggaagagaggagctacaagaatgagaagggaagaagaagaggggtgaggaggccatgagggagcaggaaggttgagttgagggaagaacagaagagagcaagataagagataatatagtagagggagacattagagatctaaagagaaatcagtcactaggaaaatgtctggaaagctacaaagatgacaccaactaacaatctaagcaacagaggagaggctaccttaaatgccctcttctgataatgaggttaaaattttgtcttttacttatgctactatcagaagaaaatagttcttgcataatgcatgtatgtgtttttgcatattttcactttcaaaatttctttgaaaataattttatattaagtattaaagcatatagatggacctttaagaagttgtgtgatatccaatttaagccccaaaagtattaaatccttcacttctatagagattgctgttttttctactcctttaattctcttccttccttccttccaagttgatctttcaaatttcatttagtgacttgaaagttaaaaagttgaacatccgatttattttataatttttatttatcctttgacaatttcatgcatgtgtacaattgatcttaatcacatccaacctcctcactggccctttatcccctgatgtatatctcccttccaccttcattttgtctcctgcttctcctccttcttcctcctcatccttctcctatttctatagcaacccactgaccactgagttcagttcgtgctgcctgcatacttattagtgtgggactatccatcaaccaaaaagaataatgctggctttcctctccacagccccagagatagcagctcttctcccattcattttgcaatgttgactgacaatgttcttgtgcagggctcatgctagtaaccacagctgctgtgattcataaatgcagtgactatgtcatgtccagaaggtagcattaaacagaacttcccatcttcaagatcttaaattatttctacccctcttctctgatgtcctctgagacttggggagggtgctgatatggaaccagtttaatcacatctgaccagttatgagaatctgcattttctgctacccactgcaaaaggaagcttttctgaaaaaggttgagaactgcaccactttatgggcataaacataaatatttatgaggcagttcaacagtatgcttatttagcaaaacaattgtaggttccctcctagggcctagggcctttaaccatatatatatatatatatatatatatatatatatatatatatatcagctttgcagtagcagtcatgaagtccctcctgtggacttgaaagttactggttattcctctaacagccatgccattattgttccagtagggaggttgtattttaggatgcagagtacactaccagtatgtccattgatggcttttctccctgagtgacctatatagcatcttccaaggctatgaaagctatctaacaaggaggatatccaagtcacttcttgtttgatttcttctatggtcttcaaccatagtgtattatgtcttcagcagtatgattttaccatctagctatagtggacaatcaagagcagtaacagtggtttgcgttgttttggggtcctctgtgacctccctaatgttacttcagagggaggtgtcctatacactgacgttttcatgtaatatcctatgtcttcagggggaagcattgttcctatgtttgaacttctttttcagttgtatttctaattagtttacaaagccgtaggtttgcataaggcttctgcatacagacttagctttagttaagccactcctgcaacatcatcctcttcatccctatctttgcttgaacctttacctctagcatgccacccacatacttcatatcacacacattcttctacccatttctcccttttgatgctttggccctctcatgtgaacttatatttttgttctttcactcatcagtactcaaactcaagtgtatatcagaattatctacagggattgttaaaccatagaattctgggtcctgctcatagaggttctaattcagtagacttaatgtaggacctaactattaccatattcatgggtttcacatctgcagattcaaccaatcatggataggcttttatatttggtggagagcatatgattcatctaacatttctgtgtatttaggaggtgggggagaggagctggggatagtctgtgatttcatccacctaggtgtcttccataatctctttggtcatcatctgtcggagaatgtggggcgtggggtcaaaaaggcaggaagtgggtgatgtagagaatctggggaacacagagcacctaagatgtggacatgggactttgtagttataggtgttagtacaggagcacagaaggttgtaggaactggaagtaattgaaggaatgggaagtaactgaaggtatgcttgctagggttgggcaatactgtgaatatggcctgagaagactggacttccacactattagtgccaatccttcctgaaatgtgtttgtttcatgtcagtgttttttgttttgttttgttttgtttctagtacagggcaggggtgaggttcattctttttctgacttcttggcttctccttcttaggtgttttttaacaacatactccgaagactatgttccgcagtacaattacccaccacctgtaagtacaagaatcatattctttctctcctgttgtaggtgattctgcatgtaatgcataagtggggagaaggaattgctgagacttacaatgtcttatacttattaaaaaatacttgcagctgatagtcaatgcaatgttttatatctatgatttattttgggaaattaatggattgtttctagggaagaaaatatctaaggttctaagtacctaagacatattaatcactttctctcttgcttatttattgtctctatctgaacggagcttgtacgaaatgaaatccacctttctatttattttcaacttatatgcacatagaagtatggaacttaattgagtgttgatattctgaagtcacattgtatggcttgaatatatttatatttaaccattaggaaacaggactagagagaaagcctcacttttaaggcactcattgagcatctagtgaaaagtcctaggttgatctcaagtatgaagagtaggggagaaaaggaagtagggagatggggacaggggagggaagaaaatatactaccgaaactaaataaaagtggcttcctactggctttaccttgtgcatcttaaacagtaaaattgctatgggatgaaattaaaatatttaactgctgacaaagaagattttaaaatgtcattattgtctcaaatactgtgatttttctactattagaagaaccaagatatgttaaactgtgaagtaacaaggataaataatataaaaattttccagctgggtggtgtgacatacacttttaatcccagcacttgtgaggcagagacaggcagatctctatgagtttgagagtagcctagtctccaaactgagttccaggacagccagagctgttacacagagaaaccctgtctcaaaaaacaaaacaaggtttttttcttcttacaatactagtgagtaagttgtgaaaaaaggaaagcatacaattatagcaacacaacataaaataattttttgaagagagtttttccaaggccaataaaaaattgtggcaatttacacaccccctaaaaagaaaccaaaccaaacaaaatagactttcttactttcagaggttcctccctcaccaagaggaggctatttctctgtctctagaattggggctgtcaggtgactgatttggtcatcagaagatggcaaaaaggaccttgtggtaactacttcatcttttgcaggcctgagtaaccaggctactattaaagggagaggcaggaaggagcgctgaagggcatggcttgaaatagaggaaaccatcttgagtatccattttcgttaaggctagagtctatttgcagcttctggttggctgcagctcctgaggaactcaagaagaggatggagttgttgagtcaattcatttgcttgctaaaaacaaaaacaaaaatcccaacaactgatacaggaatcatgaatgaaagagacatgactagaaaactgatcataaataaaatgtatgtttagtacaactaaaacctcaatggatttttgctttttatcacactttaagattataagaattatttgaaaaagcaaatagaatcatgttttgaaaacagttgtaaaaccaatttagcttttaccaatttaaagaagaaaataattaatgatactaactttatttatgttacgttctcaccatcattttccttattgaaactaactctaaatacttaaaaacagaaaatatgatagcttatggatggatatatttaatacatatagaagcaataattgctaaaaaaattgttaaagaccttacagaaacaaacaaagaacaagtataggcaatttatatggtcagaaataaaattaatcaaataaatatagataaaagatacaatttaaaagtaagaaatatgagttaaattaaaattttttgctaataaaattggcaatatacttaaaaatgatgagggaggaatataaatgggaggagattttttgttagttttttggtgttaggcagaggatacactgtttcatcttcctgggaaggagtttgccagtttatatgtggttactatttaacccaatgagtctcatttagggaaatttcatcaaggaaacataattaaaaataaggataaaatatgtagccatacatgatagtcagtgtgttgtttataatagcaaaacttggatagtgcataaatatacagtattagggataatattaatatattaaaatcacaggcagcattgtgtagcctttagattgttcatgaatagtgcttaataaaacttcactgaaggttaaaaaattgacataaatatatttcatcaaaatcacatgcaaatatagagaaaattaaaaacttgaagttctcaaaatgttggcaaaattggccattgaatgcaaaattttggtgattttttttaaacctttatattttttagaattttccaatgcaacagaacacatgtaaaaacttactttcaaaagttaatgagacaactgagttagcaaaagctttctccaccaagcctgacaacctgagttcctccctaaaatccacatggtggaaaggtcgaaggggagaacttacacccaaaagttgttctctgacctccatacacattgagatacattacccctcctcaataaacaaacacacaaaaaaaacacaaggaaataaacacatggttctgaaatgaatttcagacctgtttccttatttttcacaagctctggctctacctttgaagttgtgagttccaatttcatgtctggtgtgtgataaaatactaacaaaagcccacactgtaacccatcattgtgagggaagttacagcagcaggagcttgaaggaactagtcatatcacattgtcttagttacttttccattgctgtgataagacagcatgcaaagatagtttgtttggtgtttagttaaagaaggttagaaagcatgactggaagcatggcggctggcaggctcagccctgaaaaagtagctgagagcttgtcattttgatcaacaagtgtgaaacagagacagacagacagacacatacatacacaaagagagagaggggaagggaagaaggagagagggagggaggaagggagggagggagggaggaagggaggtatggagggagggagagaatggcaagcatttttaaaacctaaaaactgctcccagtgacacacctcttccattaaggccacacctcctaatccttcccaaacagttccactaactggggaccaagtatttgaacttatgagcctatgagggccattctcattcaaaccaccacatacatttacaatcaaaggcagacagaaacaaatgctgctgtgctacctgcttgctgcttttgctcagctagcttcccttactcttacagttcagggttcagtctataaaatggtgccacacacatttaaggttgatctcccacctcagttagcaattgagacaatcccccacaatcatgcccacataccaacctgatctagatgattcttcagtaagactgtattcccgggtacttgggtaacacaaattggttttgaagggtttaaaaaacaaaaaagaaaaacaacacaaagttgggcgtgggtgtgtaggggaagcaagggtggatctgggagtgtggatatgatcaaaatatgttatacaaaactctcaatgtggaaaaaaactctccaaggcaattctaggttgtgtcaagttgatagtgaaaactacccattacagacacctaattaaaataccacagaatatgaagaacaaaatataaaagaatgtgagctgtgttcttggaacacgtaagtgtgtagccattcttacttttcatgttgtcaacattccttctaatgtttctcactttgcttgcttccatggtagctgcacaacacggcaggacagttgtgtggctttaactgcagacttttgttcattcacttctactttgatgacaaaataattgattttgaggcctgattttagcactgcttttcataacacattaatgagtgtttatggtattatattgtgatattttaaattgtaacggctgatggttaaaacacagcaggatagcactgagctcttacaatgaagttagcatgcacataaacaagtgtataattcacagaatactgacaaagaaagaagaatagctattaccttgttagagacttcaccatgtgaccttagcatgaattgatttctctactcattcagcctgtaaacttcatatgttagtatcgaacaattttgaaagcatttagactcacatttatttcaaatggaccttgagaacctgttctagcagggaaaggcagctactcgtatacccttgaccctgtagactggtcctcctctattcagggaaggttatcctctttgatcgagcgtgcagctttggggcaacgcacatggaatggtgagggaggaaggggacactcgcctagccatccagatcagccgaatcaaccctggcgatcaatggggtgacagatgtcacagccagatcgccctcacatccgagactcatttatttcaaatgtttgttaattgagaccttatttttatactggtctatccatacagctccatccatgtttgtagggtgggatgtaggaaataaaggtgatggatgtagttgggtgaaggactgaatcagcattcctggagtgtgtaatccttttagttagggctaacaaaatgaagatagattttaaaagagaggacctgggagattactcatgcaggtaaaaaagttccttccaccaaggtgtgataacctgaattctattcctggaacccacacggtagaaggatgaccgactcctactagttgtcctctaatctttgaacacacacacacacacacacacacacacacacacacacacacacacacacacagagagagacactaaatcagtgtaatggcaaggggcaggtaatagcgtagtgaggtaggtaggaggtactgattaaagtgtgtgtgtgtgtgtgtgtgtgtgtgttggggtcttgggagagattatttcagaggtagggcagttctggaaaatgataagagtcaggctgctggcctgagttttctcattgaatctactgctgtgagtatgtgaaagaaaggtaatgcaaaatgctaaccactttcaaagtgcacaacttggaaattaacctccaggaaggtgtggctgaagagtgaagacaaagactcttgctgttgatggctcttgccagccatgcggcttccatttgttcagcatcagttgtcaagtagtactgtgttttcctaaacagtgcagtcttctaaactttcagttacctgaacatttgtaaactaaaaacttgtttgctaatcctgctcattcagaagctgaaagctgagcaaagttttagacttgagtatttgctcagacagactagctgacaaataccctgattatcaccagaccacaggtttcttgcttggagaaatggctcagagggggttgtactaggcacctttattgttcaatttggctcattctcaaaaatggagttccccaaagactggaattgcttttagtgtaccgattcctgcacagaaggtgcctaccagaggccttcaaaagaatactcgggaaagggaaagaatagctcactgagaacaaggcctgggacagaaagtaaatctagaatatggggggtctccagcaactgccacctctatctaccacattagcaacctagggtttgcaaggggaacagtaatcactggaatggcctccatgatttagggggaaggcggctttattgtggataagaaaggacatccagaggcatctggaagagtccacagcagagagaaatagcaataaactggacatgaccagggctatctgtgtgagagaaggaaaggtagtaggagggattagtagcggttccaagatagcagttgggatggtggggggacggaaaaccttgcccttatatagagaacaaacaggtatctggggggagggaagccttggcagatgaggtcaggatgctagtgtgggctttgaaatgtatacaaatacatggaaagaggttctgagaaagcctggaggccagcatgggctttgacatgcaaccacaggtatatgtcaatggagagccctatgctccttctgccagagacaagggaaatgactctcattggtggacagacaggttcctaactaacgctggctttttctaacagctgtgcttagactgtcatttctggacataagcacttcctgagacctaacacacaggctcgtttcattcagttgcttgagtcatagctgcccctttctgtcttcctagtctcatcactgctttcatttcaggaaagacagacctgccaccatgctgtgacctcattctctttctcttcaccctctctcttctcctgcccctcctcttcctcctccatctcctcctccagttatataacctcttttggttattcaaaaagaagtgcaagtctgggccatatggggtcccactgagagaggaagtggacacaggagcccatccctaacacaggagctagctctaactgacaaccacttgcaaataaagataaaattagttttctccaacagtatttctggggatacaaaccactcttaagggcaggccccatgctcagctgtagacagccagtacaaacaaattcaatggaattctttgaggttctttgtctcataatgctttgtcaggacttttgtgtatatattatgttttccagtttggggtttttatgggatttctgtgtgtgcaaatttgtgcctttgtatctttgtgttatgctttttttttttttggacttttttccttctctctgtgtgtttgtttttatcttttttagatacctgtttaaattctaatgacacagagagaaagggtgtggaattggtatgtggagacgtggggaagatctggcaggagttgggggaggggaaactgacatcagaatatattgtttgaaaaagatttatttttaaaaatgtacacaaaaagtcatgtaatataaatcttgctgtgttgaatagttgggtataaaccttgtagtccagaatagcatgtagttttgccaaaattttagttggaaaattaaagctgaaacttaattaggtaatgttccaggctgcctaatgtgcctttattatctttagtgggggaggagatgatttttgtatattatgtgtcatatgaatatatctgctatttaaatttcttttttttatcctgttactacatatacccacaaaagaataatggtgatttcctgagtgtgcttgctatattttgtgtgttaagatgaatcacgtgagcattttagaatctgcaaatgaggaagtggcagggttggaggtggggaagaagggagggtcatgtgaatgttcacagtgtaaatgctgttataacctatcaatgttccatgacactgctgctggaaacagatctctatttggttaataaggacatggtagcctttctggacctaaatattacatttaaaagaccttggagtatgtttacatatgcacactgaatgtgtacacatgggcatatgtgtacaacatatgggcaaacaattcaagctctcatcctcacatccttctgccactagttaatgaagaaccacctttcttaggcccagttacaggctcaaggtttgttgatgtcgtttgtatagctccacacggcttgcatagcttcccttgttgactggaatacaggagaatttgccttactggtagaatgtcatagctggtagaccagtaggaagaagaatggaagggagatggagatagaggcggttccaaccactaatcctcaaatgatgagcccaaagcctgtaaatagaggatacagttgagtcttgtttgtaccacgtggctcaaagcacagcatctgcatcagatggggtcactttgagcacttgtctgttgtttcattattaatatttaacctctatggagcatagatttcctgctgcagaacatatgattcttaatgcctaattctaacaagcgtctttcacagggcaattgtgatgtgagctaatacaagtaagacagttaggctcgtacccttacgcatgtcaatgcacttggacatcattcatctctagctccctacttcttgtcctcccttctgtccatccaatcctctcacctgccccttctccaagttctctttgtctttcaaaatagatttttttctcacagaatatatcctagtttgccctccctctactcctcccagtttctccccacctcccctcccacctggctgcacaccccacccccgttctgtctcagaacagtcttataaaggataataatataatataataagatattgggagctgacacttaaatatagggatgaactggaggttgtgagggagattgaatttggaggagagaaagaagtgaagatctgcagttggccctatgtgtttccctctaagttctctgactcttaaattcagttatttgactctgtctcattgactctgttccattataaatatatttgttttataaccaggtaacattttggactttgaccgacatttcattctgtcactttgaaaacttgatattttaattctccacgcaactgataagtcactaatattccaggattgtattgtaggaaagagatttttgaagtgacatagtttttccttagaaagaggtcagctttgttctgattgccatgttcctcctagcagtagttaggtaccatacccctttgcctctaggcaaggtcacaaagctcagtaatacttcagagaatttgggactaggagagattttactttcttcttttcaaatgtttgatttctctagaaaacacatgtcttttataaaggaaaaatattttaaaaattgagattcctagtcttcatttacatgtgatatattttatcatttggttataaatacaaatcattatcagagatagatgtcctcgtataatactgactaaggaataagaaaaatgatgtgtgtgtttcctgtgactggaatgataggtctaatgtcagcagctagtattccataggctgctgctgtcagtattactgcctggaaactaagtggtgtgattttacactaaaaatcagtttatcttttggagtgattgttcacatagatcttcctgtttttctttataacaaaactttattaaattggctatatttgttagttgtgtagcaatttatatttgtacgcacagccttagctcctttatacttcttgtgaaatttccttatggttgagtatctagaattacaaaaatgtttttttcctttataaaatgtagcagtaaaaagaaatagtaagttctacttcaatatataacaaaatgcatcccattagtgacatatttattatcgctacatctgatgatgattattattgtgttaatatagccactgagaggaaataacatccagtaggaatcaagtcactgaagtttagtgaagaaataagtaaggtctgtcacctagtgtcacccagggtatgtaaggcagattcttgctcttttcctcccatgatgccctgcatgtgtgtttagaagacattaccagaggaaggtggggtcatggaggtatgtaggagtcatggagtttttatatatgatatgtactaaaaataacaaaaccttacaggcaatctataaaaatacatactttgattttgtccaatgtggcatccacatcagtatgcttgctgctccaaatgccttttaagagtgaataaagtaaccagaatgagtgtgcttatgggcacacaaggggaagggtagcctttgatgaactaacgccaggtgggcaatggctgtcattacagtaaacacaagggtagtttacagtggctgatttggccaggatacaacccattatacatgtttatggatgagctggatggatgggcaatgactgctttcaaattacagcacaaaattaggcagctaacaatgtttcagaagactggtctccaaatgaaaaggaccttgaaaaaataaaactatcaaataagaaagaaccaaggaagcaaatgaaagcagtaagaatagactgtcagaatggcttgctggaagatttggaaaacttggctgaggattagagatacacattgactaagaaacagcagtgtcattttatcaggggaaaatgatgcaggagatatcggtatacagggtacccacataacttctgggagagttagtagtggtttttttcttagaatataggtaactgtgcttcaatgtagcactcagaaagcatggattgtggggatgggatgggcttgagccaacctgttctataaagatatatgagtagtgcgcatctgtctatatgataaaacctgtcacttgtctttcaagcatgtgaaggtcaattgggacacatactcacagaagcctactgtaacatcctaggctgccttgctatgatccataaaagagaaagaaggaagcagaataaaaggatgagaagaagaaatctcctcggccagttttccccgggctagctttcttctgtgtgttcttgctgtagcttcagtatagtttccagcatctaaccaggctgttcagccctcagcattcctttcctctctgccttttatcgacatgttttcttgaactctcttcactcttttctgagtagcatatgctaaggtgactagaaattgattcatcccactgtgttttgttaggtcttgttctgttgcttctttccaaactagtgttgttggtgtccactggtcctcgtagatctacactgtccttgttgcaccttcccgatctttcatgacttctcttttaacctagccttgggcaccactgacatttgggttccagaacagtgctctccaattttacccaacctcagagaattcatatgccccattagatctgcacccatcattctgggcatacagttttagattatataatttaaaccttacaagaacatttcaagaagtacacagggatagccacaaaacttctgttggagtcagccattgtttatcctgtgaagattggcaactgatgtgggatttccttctgtatgctgcaaatatgtgttgctttttttggttgatgaataaagctgttttgaccaatggccaggcagaatagagcaggcaggaaatccagagagaagagaaagaaggcaaagtcagggagatgccatatagccattatagaagatgccagaacatcacctgtaagccacagccatgtggtgatacacagattagtaaaaacaggataatttaattgtgagagctagtcagtaatatgcctgagccattggccaaacaattataattaatattaagcctctgagtgtttaattgaggaacttgcaggtgggataaaaatatctccatttataggtaactaaaccacgtccctttatcctacataaatcaacatgttaactagagcaaggacacatagctatggtacagttttcaacctcagggaaattgatggagtataattatgtaatccacagtccacaacagataccatctacggtccctgcgatgttctctacagctattttctccctgctgatgatcactgctgcgtgtagggcactgactcctctccaggccatctgtcccatcacactgtcttccaagtaaacattttgtactggtgccatctcaaattagaaatgtctaaagtgtggctcataatttctccataaaagaagtcctcccccatccccgtgtcttattctttttagtggtgttacaactctccccgctatgcagatttgatgctatgaataatattgattctttgtacccagttagccatgaaaaatgctctaagctccttttgtgaaatgttctttgtctatattctgcaggaacctctgtgcaataatgcctaatgtgtacacatgaagcacttacctcccagttatccttatctataaaaagctcagatagttctttcaaatcctagtcctgactcagagaaacaggtagaaatcgtggtcttggtagcaatgaatactgtgcctttcagcaatctgtagtaattcaaatgtctgttcctgcaaataattctaaacactctcccatgcccactaaggaaacattaagcaagggttttaggcattctgttagggagctgagcatatcatactgtctgcagctagtgtttgaagaggaggagagtctaactggtagataaccttcttaccaactctatcatggtgggaaacaattcctctttccagatacaacctcatttagatgccacaacttagttactataaggagtattcagtctaaatcgtgccctctccccatttctccctctctctctttgctttctccaccttttgtatctatttgaaattttgataaagacaggatctcacagtgtagcccaggttgtcctcaagtcaaggcagtccttgtgccttaacctactaagtatgggcactataggagtgagccactgtgcccagctcttgggtgttacaagagtgagccactgtgcccagctcatgggtgttgtacgagtgagccactgtgtctatctcatgggtgttatagaagtgagccacaaggtaagtcactggattaaggagtgagccactgtgcccagttcatgggtattatagaaatgagccactgtgctcagatccatctctctcaaaaatactctcactttctcaaagattatctcccattatctgtatacagtgaagaactaacaaatcaaagacaagactactatcctttccaagtccttgttctaagggctacctggcttgcttgcatctggaaacttgattttcaggatcacaattctcttatcagaatggctccctgtgccaaagctaatcatacaacccacatggtttatgccaaacacctgtttttcttctggtaatataaaattttggtgcatgcagactggggttggatgtgaccagtgcccaataaaaaccatgggcatgcatttctaatgagcttcctctatatgaggggctcatatatatttatccttgttgggataacagtccaggggtctgcacctggtatcctctgggcttcagcccatgcacctgttctccatgctcattttacttcatatccttttgagataataaatcgtggctatgtgcagaatccagatacacactgtgagtcttcctagaaaaatcattatactcaagggggatttgaggttcttggtccaacttaatcttctccttaaaaggaggagagaacctagtgtatcaaaaatgactaaaatctgtgttccacgcgaccaggatgaatggcttttgctgagaaggggagtcagcttcctactgtggaatctgggtgagctgtgtctctgctggaaatggtgttttgaatctagacgatgaaaagcaatgtgcattcctcctgattcactttgtgtcgagttcattctcagaacttggtcatcattgaggaagcccaaggaagcacacaggaagggcctgtgcagtcattccagccagtagcctagagcagatcccagtgaaaacctaccaactactaaccacaatgagagaaagttcccaggtcctggccctcaaggcaccctcagttttcaggtcatcccggctgatgccctagacactgtgtctagggtgtaccctagacacccaaagaatctggaggtgttgtagaatggccatttatattaccagagttggatggcttgttatggagcagcagggatggtaactttccctaaaaggacatctagctatagtgaaaggtacatgttcagcatcatgattcctgagaagagtggagtttacatgtggtgttctctatctgtgtttgtctctggccacctggtgctctttccttgttgtcactaatggctaacattgatcaacgctgaaactcacagcccctttcctttcttatcttgggtggagatcgcctggctcactttctactctgactggtactgtagatgccacagaagcatctgtgactcccattctgtctctactccaatgctcagctctgctgtctttattaacatcccgtttccaaaaccgcagctcctttccgatcttggcctccccgtgatacccaaagtggctcaggatagatgactctcagaggtcccttctgcctgacaatccaaagtaagtgagaggcaatattacaggtcaccaattttaagagttctcaactgggttggggccatgagacctctatggctatctgtttttatttattttatttatttatccactatacttcttcctgtccaaaacaaaggggcccttcatggttaaatagcaggaatagagaaaacattgtccttttctgctgtcccgatttccttctttctcagtgtttcttcctaaggttcctcagactctgtcttctctccctgactcttccataaacaattggagtaaaggatgctttctgtgtacatttaaaggaaccctgtgatctgctgtttgatggctggtgttcagactcctcaagcctgtttgttcatttactaggataataccttgctggctaaaaaattttgttttgtatgcttcaagtcagcattactttggtctttgactggtattgttctgaaacacattttatactccctttgagcaaatgagtggttatacacactgaggggaaacattaatgatttttaaatcacctccccctgtttatcgatctgcatggtactccagcttgcttgctggagttcaggactcccactatcccagctttgccttggggtctgagctgtagtcactgtggggtacctgcttttttcatgttccatctcaaggcttttgtattatgctttggaaaggttcctcattttacttcccagtgaggaatctaatctcagttgctgataatttggttttgtttctgaatgcctgtgttgttcacctgttctgtttggctctttctgatttccaggcatctcccctgccaccagctcatccactgtttaccttcactcccactttttagtgtgtgctctgctgtcatggttctgactcatttccttggtccaagggtctcagtgttctcatgttgcatgagaaattatgtcaagatgcttttggcatgatgcacaaaacccagcttaaactgaatcagacagtaaaggcaatcaattggctcacatttttgaaacgttagactttgggaaaggtcaatactgtttcttatggactctccaaactgctctttacaagtattggcttcagggactggagagaccctgagtttcatctgcagcacggaaaataaataaaaagaaaaaaagaacttgatctcatgatatactggcagcagggaagcttccagttgcaatctggtctagaagctttctcatttaggttggcaaggtccctaatgatttgttctactctttgaagacctgctgacttaaggatgcagtgaaaccacaccaattttcttaggtaaactagattctgcccctacttctgttctgaggtcatcctgcttcacattggcagctccacactgggaaagggaactcagggagagctcgggttagctctcaatattttgtgtgaaagattaagctcaagtcctccttagttttctgacctctgtcactttaaatgagcaacaggatgggtatttataccatggaaactggctactgttgcacactggctcatttgttcaactggcaggcatgctgtaatacatgttaacaggcaacaaactagtcttcttaactagtttttctgactttagaatcactcccttcaatgcacatgttgatttttaaacaacgcttttactgagatataattcacatgctacagaattcatctcttttaagcgtttggtttgtttcactttgagtaatgtttttgctcatgtcatagcatccatcagtattttatttctcttggtactaaacagtatctgtttgttcgtccatcagaagatgctgtgtgagttattgagacccacttccaaccacagttcttaaatccagtcttttcttcaccaagtgcagcaattcagagaacaggccctacatcttacttgggaaaacaatcgagctggccctggtggtatgactgctgataagcaggactgagggtgtgagagcaggagtactggtccaactccttgctgtctgctacattgggtgagctagctgaggcagtgttggaaagctctccccattggtgacaatgagggaaagctggcagactgaccaacgcagctaccatccagtcccagaacaggattatgaggtaacccaccccaacacccaccttatctatgaactgctggaacatgtgaaggggttggacctgcagatccaaagctacaggatctccataacacaaggcaacaataagatatccaggaggagtcccagtaaggggcccattatctttagtgtagcagaagccagaggcctcaaaccagaccaatgactcattccaatgaacacttgcaagtaaagatgtatggactaaagggtatactgtgtgactcactggaccattctacagcttctatgctgagattttgttttgttttattttgtttttttgtttttatttttaaattttgttttggcaggaggttgcaagagcatgggaggaagcaaaggaatagtgagatgagtgggattgggatgcatgatgtgaaatccataaagaatcaataaaagtttttttaaaatccagtcttttctatctctaatcttttaatacttatgcttctagaatcatttccctaagatataacactttgacttgtcattcacctctgcctatgagaagctacaggaacacatcaaccttgtatttgaaatgttcttcagtttgaccccaataaggaaaggaatgagaagattctgcttccttcatgtggatagtttgggccaataatacaaaatgtcatttaaagtgcttgtttaagactgatggaccatgtattcccccatccctccatcaaaccttccatccatccaaccaaccaaccaactggccaatggaaaagtccctccatcctgaatatggcacccaatggcaaagtcaaagtccaaaccatgtagaacagtatcatggacttaatttatgcttaaactatgatgtcatagtttatgcttctggagtgacagtcggtctgaagtcaaatagatcggcttgtaaccagcaataacactggcttcctttacattctctcctggggcttaggaaagcctttatttatgtgcaaaatgggagtaagaatcaaaccccagtatcccattattggattagaagacacaactctgaagtattgtgctcagcccatagtgggcactccacaaagaggtggacactgtggttgaatatatggttacaatgccattcaaaaaaaaaaaaaaaactaagatgaaagtgtctttggtgttctctaatggttttatagcttgagtggtttcatgttcatcttgttctgggctttaatattagaactgacttaaagcagaagtcaggtgattcattttatcaggctttatgttgtggatcttcatcactcctggtgtagttgggaagaaccagtgctttcttgggaaatgacaacaataacatcatattttattactaggaagctttttagtgaagtagcctaaagataagcatcttaaactatgttgggctgttttgagtcaaatttctcataggaatgaacctcagagattggcatttaccattgtgggaagcatgacttaatgactagtaaagatttaacacaagaataatcctgacttattgataaaagatgttgaaagtagttaatcctaatcacttaggttttatttagattatcataatgcttcaattggcctccatgcttgtacttagtttagaaaatttgtacatgcaaaataatgtacaattttaaagtcttaaaaatcaaattactgtgatatagattcttctttcaggattggaactacttataaatgcctagacagtgtttggttgctcttcattgagacatttggtaaaaatcaaataatcagttgttgaaaatctgtttagtcgcaagaacaaacttttggaacttgtttctttgaacaaatacttcagccactaatatttctttcttctcactgtaggcttgtcctcgtcaagaagactactccatagtctacaggaagtgccgttcacaattcacagacctcaatggctccaaacgttttggcatcaacacatggcatgatgagagtgggatttatgctaattctgaggcaaaacagaaactctattcattggctgacaatcctattgtcccacgttaaaaataagcaatcactctctcaggcgaatgaaaaataccaaatgtagcagttaatatattcttttaataaacacagtcttcaaatctaaggaaatgtttatattcatattctcatgagctaccctataattccccaaatttagcatatgtatcactaaggtgaggcaaacaattctagaatgtatttatggttgctttctttgttgtatggaatatgtgtttctttcatagttacaaaaaaatggacaaaactggcactatccaacttgtgattatttagtatgtagctaatttttatttgtttgtttgtttattttattttttgtttttatatccccattgcagtttcccttcccttctctccccagtccctcccccatttccctcatcccatctaatcctcctcctgtttctatttagaaaagggctggcctcccatgaatatcagccagccacaatgtatatcaagttgcagtgggactatacacctccaatcctattgcggctggacggagcaatccagtaagatgaaagtatcccaaaagcaggcaggagtcccacaacaagacaaagttacacaagtgtaacatatatgcagagggcctaggtcagttccatgcaggttccctggttgtcagttcagtctctgtgagtccctatgagccctggttagttgattttgtgggtttgagggtgatctggctgtggcatctgttaccccattgattgccagggtttatttggctggctaggcttgtgtcctcttcctcccttaccactccatgtgtgcatccctcctgaagctgcaagctccgtcaaagaggatgaagaggatgaccttccccaaatagaggagggtaggtcttctgtcaagggtatacgaatagctgcactcccctgctaaaccctccaaacaatctaattatttttcttaagtgagctaatttttttttattttggtggttctggagattgcattcagggccccacacatgctaggcaaaccctctcctactaagcaacgttcctaaccaatttcttctcacttaaaaaacttcagtgaaaacacagtagttgtgatatttatgccatataatatgtttcaatacaagtataccatgtacagccccatgtggcaataaatgcctgtgatcttagtactcaggggattgaagcagaagggtccagtggtgaaggccaggctgggttacataccaagtccttgtctcaaaaatccaaaaaccaaaacaagccaaaaacacaaaaacacaaatcaaatatataatgtataatagtaaagttgaacaactagtttttcaaagaattatcatttctttatgttagggacattcaacattcggtgcattagctattttgaagtttataattaatattagaactaaatttaccttactgtgctatagaactcaggagctggctcctccctactaacaggtcctgttttctagcctttgtcagtcacacctctcagccccctcctagtccgatgaccactatcctctccaccttaaagataagttttaagtgtgtaaaaatatagattaaagacagagaattaaagtttaggcagcattactcctacagtgatggggtgtgtgtgtgtgtgtgtatgtgtgtgtgtgtgtgtgtgtgtgtgtgtgtgtgtatgtgtgtgtgtgtgtgtgtcctataggctttgatttttctgtggtagctaactgcaccccatttattcaaggtaaaatctgtttaagatagaggggatcagacagtgtgacctttggaagtggctgggaaatcaaatcatttaggattagattgaaagaaatcttaggacttcttgacctaccctctcataaattaggtcctttatggtaccagccacctgggactgcaggacaaagtggtttacacactaaaagtccccttttcagttttagaggctggaaaagccccagatcaagtttctgacaggcttggcttgtgtcaaggactcatttttttgctctgtcctcttatgtagttgaaggatgaacttgctctcttataagacctcagtatagttgggacagaccacatcctgatgatctcacttaactcaaaatacctcctaaagaccctatctctccaatagtcatgcttaaaccttagagttctgcatatgaatttggctggggcacagaatagcatagaatggttggccagagttctattaatatcatattctgtattctggatgattttttccaggtgaatttgaatttgatttcctttgagggtggttttattttatcaacctggcttttatttcccctcactattatcttactttattttttagtggtgtgtgagtgtatgtgtgcgtgtgtgtgtgtgtgtgtgtgtgtgtgtgtgtgtgtgtgtgtgtgttggagagtttatatgcttatgagtgcaggttcttgtggaggccagaacaattagagcccctgggagttgaagttataggcagttgtgagtgacctgaggtgggtgctgggaattgaacttgggtcctgtgcatgagcaacatgggctcttaaatgctgatccatctctccagtcccattaccatcagtttaattaaaaaaataataagttcatgggctagaaagatggtccaggagttttgagaactggttgctcttccagaggacctgggttttattcctagcacccacatggcagcttgcaacagtcttgactctatttctaagaaatataatgttcttttctggtctctgaagtaatttttgatgataaatgctatttgagcactctatacagctcctgacttgcaaactgtgagcaattgttaagttatatgaggaaaaaagtcataattaataaaattttgataagccaagtaagcgttccttgccactttaaagcctgtgtctatgtaacatagaaacatgtaatcagacattcataaatgtgtgtattatgcattaataaaacattgaaacaaaaattaagctcccagtaatggtggggctcatgatggagcatgagctagtcccatgtgaccatgaccctgttaggccattgcctgttgggcaggtcaaagaattatgtgagggacatggagaccccttactggcccaacttgtgatgcactaaaaggaccaacctaatgaggagacctcagccttcatctaattgcttccgtaagttctgaatagtgacactcttcttttggagcccatctacttcattcacgcttgtcttatgtcttagttagttttctattgctgtgataaaacacacaaaacttacaaaacaaagtatttaatttgggcctcatagttccagaagattagagtccaggaccatcatggcaggggacatgccaacaggcacagtactggagtagtcagatgaggactcacatgtttattcacaagcagacagagaaatcttattaggaatggcatgagcttttgaaacttcaaagcttaccaccaatgacacattccccccaaagagaccatacctcctaaactttctgaaacacttccaccatctggagaccaagaattcaaatatgtgagcttatgggggccatttgcattccaactcctataccgtaataagtctttgtgccctctgctagcttccttgtcaatgattccttatttttgagagagttattgccttggaataacttggaagttattgcctggggtggttttggtaagcattgatcttctttcctggtaaaaattaaccaaaatccagagatgactctgttgtactcaaagaacatacatcaatgttgcctgtctgtgttaattcttttatctgttactctagttcagttgttctcaacctgtagatcaagacccctttggggttgcttatcagatatcttgaatatcagatatgtacaatatgattcattgttatggaatagtctttttgtacactttgaagatgtgttgctctcattggtttaataaagagctaatgaccaatagctaggcaagaagacattaggtgggacttttggacagggatgaaaaaggggcagagtcaccaggagatgcagagagaagcaagatgaacatttcctgctgtaaaaaggtaccaaaccatgtggtagtatatagataagaaatatggttaatttaagttgtaagaggtagtgagtaacaagactaagctatcagctaagcatttataattaatagtaagtctccatgttagctactggggagcagtcccaaagaaaaaatcaaacttataattcataaaagtagcaaaattacagttatgaaatagcaatgaaataattttatgttttggagtcaccacaacatgaggaactgtaaaggatcacagcatcaggaaggttgagaatgactgctgtagttgatacgtgcttaggatgacttttccttctactgattacaaattcaagtttaatcattactaatatgcattagtatgccctgaaataatatttattagtatgctctgaaataaaaatgaccttatccttccaattcctgccataaacactgtaaaagctctgctggaatggttggaaaatgagtacccaaacaccatactgtgccatcatttaatagataattcttttccatgaacagaaagttttgatgtccacatccttaccttagaagcctgtcacctgtgcataccattgccctggcagacatcatacattgagaaaaagacttaggtcttctataaaggataagcttaataatcagctttgttgtggattggcagaagaatgaaataagagatttcatttacaatagttgaagaaaactgatttctaatgatggttacttcttcaactaatctgttcagtttctcagtgaatgaatggacatcatgagctctgaacactaaagtttagctctttaggacaaaaaactcatagtgttgtggatttctttagataattgatcttagcacaatttattacaagaaatattggagttcagagctggtcattattgaagaatgtccttttaggaaggaactatactgcctcctgtcagaactatgtcatgtcagaactaggtagaattctgagacttcccaacatttgttgtttttgtttttagtgtcttgatatagcatcctagtatatatgaactgatttttagctgtgattcttcaataacatgatattgaacatcttccattatattctttggtctttaaaaatatcttcttcagagaattgtcttagggtttctattacaacaaaacaccatgaccaaagcaacttgggaagaaaagggtttatttggcttgcaattccatatcattgttcatcatcaaaaagtcacaataggaactcaaacaaagcaggatcctggagctggtgtggaggccatagagagttactgcctactggcttgctcaccatgctctctcagcctgctttcttatagaacccaggaccaccagccctgggacagccccacccataatgggctgggccttcccacatcaatcactaattaagaaaattccctacagccttgtctacatctggatctcatggaggaattttctcatttgaggctccctcctctctgatgactctagcagtgtcaagttgactagccagcgcaagaatctttatttagatcatttacccacactttagttgggttatttatctttttttggattcctttttatattaaattatgtgtgagtgtctatgggagtttgtgtacatgagtgaagccgctcatggaggccaagagggcatcagattccctggagctggacttagtaagtgtggttttttgcctggtgtgggtcctgggaactgaactcaggtcctttacaaaaggagtctgtgcttataacctctgagtcatctctggccctgttacttatcttttaaaatcataaacttttaaaacatattttttaaaaaaggaacataatctggaaaacattttgtttgacttgagaagcagcctagaaactttactgagaattaatcatttgaatttctattttaaaacaacagcaaatttgaaagtacaagtctggaagatcttaaaggtaaagatgcagaaatgtgcgtacgtttgaatgtgtcaatatgtctgataatggtgatatgggaggccaaggaaggaatattatgattactcacaaaattttgtataaacacattctctgctttttcagcatattcctctgtttcctttgtcaataactttagacctgataaacttaccagtatttttcttgtgacagatcactaggaaatctcatgtcaccgtgtaatgaaagcttgcttttcatttcagaagtgtgaatactgaacaagttgatataaattccctcatttctagaagaaaatatgcatgtatgatgtgtatgtctctctgtacaaatgtataaatatgcactcatacacataccatataatgtgttatatattgtataggacaaaaaggagatttgcaatttctctgttagctttctctaatcacctggaaacatgcagacttagaacaacaaatggtgtttcatgttttgagagtctactaggtgggatctctagacttgtctcattgggttgggatccagaatgttctcattctgatagcaggctactgactcaaggttgacaatgccaagggtaccctggccatgtgtaatcatgcagcaaagacaggtctcgatgacacaggagtgatgacagggttcccaaaagcagtgggttgggaagtgtctgtgcctaagggcttttcaaacatctgtttgtgccaagtttactgagtcatggccaaaaaaggttccgagcccagccaagtagtggggactggctttgcaaggatcctagaaggaggggcagtttctattttttcaattaatcacagaactgttgcacatttctcatgacaaatctttctttgtaaaaaaaaaaaaaagaaagaaaaagaaaatccatataacatttcagtcagagaattattttacattagtgacatgatttggtccttttggatgacttcaggcttactgttcttgctctagctgttagtgaaattttgtttgggatcaagacaatgagtaaaacgtgtttgccatgatcaaatggtgctctgagagaatgttcttgaagaagggcatctggggattgtgttaccttttattaatatcaaaatccatgcacagtgattacaagacagaatgaggaatctgggtcatgtcaccagctgctctgctgttcccgctcactgctgctctgtaacctcattcccaaaaagcaatggggaagctccagttggcttgctgccagctcaaccaccatccaagagaccatgtgacctcctcaccccccagttcttatcaggtcacatatccccagagatgaccacacccattaggtcaagcagccaaagtacagttggttttccgactgaattcccacaacttgctcaggtaattaatgaaaacacaatcgatacgatttgtttaaaatatttggttaattaacatgcttagcctatcaaggatttaatgatcttgcaaaaagggaggagctgtaagattaccttaaaacaatcttacttcctgcacagcaagcctggcttttccagagtcttcagtctgctcagatcttaagtaagctaaagcatggatgacgtgtttgggatgaatattctgtgtggtacagtttgcctccagaatggctcactgacatccttggagtggatacacattttataagttttcagaaggctgtgggtaatggctcatctcatctgcacttgtggtgccatttatttgttttataagtttggaaggtatttatgaacaagagacagaattttgtcattgtgtgtgtgtgtgtgtgtgtgtgtgtgtgtgtgtgtgtgtgtgtgtgtgtggtttctgaactttggctcttaacattattcctacaagttaatttctcatcacagataagcagtgtacattaactgaaccagtggagcaaaacaaccaaaataagatgtggagctagatgcaaacttgatttacctgtgatagttatagatatataactccatagatgacccaaggttaatcataagaataggtactctgtacagctgcaatgacatgaaagtgtcttcagttttcctttagatgttgcaccttcttgcattctccagcaccctttgcaacttaggcttccccctcaatgcttcatgcattgccttgccctgggctctccactgggcatctgatctttgacacatggccgggtcaagcaggcctttctctagacccttaatgcctctctctcttgcattctatcttcctataaaaccagtaccacatgaacaaccctagactcttatgtcagttggagtgatagccaggcttccttgaactgtggctacaatggcctctgactgactgtgtagtttaaccttggaaaacaattcctgggtggctcctttccagtagggcaccctttcagctgtctgcatgaactgtatttttaggcactctccttttgaatggaagtctttaaacttcatttgccctttttttttttttttggtttttcaggcagggtttctctgtggctttggaggctgtcctagaactagctcttgtagaccaggctggtctcgaactcacagagatccacctgcctctgcctcccgagcaatgggattaaaggcttgtgccaccaacgccggcgccctttggtattctggcgccctttggtattctggagcctcttttgagtgaggtcttgccatcaacacacttcctagtgtcccagtgcgaagagtgacacttctctaatgacactaatctctaacaattacagccatcttgtctgcaacatcaatgcacttattctcttttcctcactaagctgtttatttatttatttatttatttatttatttacttatttattttggtttttcaagacagggtttctctgtgtagctttggagcctatcctggcactcactctggagaccaggctggcctcgaactcacagagatccaactgcctctccctcccgagtgctgggattaaagacatgtgccaccaacacccgactgtatgtttattttttacttctttctgttccaatgtttcttgaccgaactctgagagaagctgactgcaagcaatgaataacaaacatgtcatagcctgaatgttacactgtcttcaaatttatttgcctaattactccattgttttaaaattcagtctcactaaagttttcaggccactagtgaagcaaagccagattcttggccaagaagtaagacaaacagcttctacttaactctagttaccaaaatagtccttttttcctcctgagttctcatgagcaaggtctttgtgggacacagtctatatcagcatgctggtcttctagatttaaccataacaggatggtccatgagttctgcctatcgctccaaacctttccagattcctcccacagaccagtctaaagactgcatgttcatcacagcaatgactccactactggtgacaattttcttcctagctattttttttttgtcctgacaaaatacttgacaaagcaagttaagaaaagaaagattcagctgggcgttggtggtgcatgcttttaatcccagcacttgggaggcagaggcaaggcggatctctgtgagttcgaggccagcctggtctccagagcgagtgccaggataggctccaaagctacacagagaaaccctgtctcaaaaaaccaaaaaacaaaacaaaacaaaaacatgaacaagaaaagaaagattcatttgggcttatggatttcaagcatcaccgtccatcatggagggaggcacaatggagtgccttggtccttgttggtgggggagtggagacatcaacttgctcacatggctatgaaccatgtgtgattttaatgagaaatgtttcctatagcctcgtgtatttgaacacttggtcccctatttctggtgctgtctaggaaggtatgaaacttttaggaggtagaactgctggaggaaatatatcactgggggtgacctttaaggtttttatagcggggcttcacttcctattctttctctgcttctggtgtgtggatgcaatgtcatcagccagccagcttcctgttcccgccactatgccgtgcctgtttgtcaccacacttccccatctggatagaatgcatctcttctggaattataagctaaaataaaccatttccttctttaagttgccctttcttgggtgttttatcaagaaaattaaaagaaactagtaactaccaggaggcagagaataaagacaagaactaaggcttggatataacttcaaagaaaactgtgagctaggccacaacttctaaaggctccattgccttcacatagtaccaaaaggtgtaaatggagaagaaacctgagcctgtatttgggtcgtttcagattaaatccataacatcctgaatctcagagtgttttgaacaatactgtagatatgggatattttgaacaatgagaggctggttatgagataggtttagaccctttgaggaccagggacagaacagtctaaagagatgtgtttggatatcaagttgacaaggggtgggcttggattcttaatcttcattgtcaatttgactgagaaatgattaggaaatcagtaaggcatacctctggatctttgtgcagattatatagggaactaggaagctttgtgaatgtgggctgtgccagctgataagatgagaaaaagcaaaaagctactgtgctgacattctcattctgcctgcttactgagttgtactccatgccatccttacaatgggtggaaacctctgacactctgagaccaaataaacaatgtcccttttgatttgtatatatgttattctatcacagtgatgggcctaacaaagacactaacccattcttgagggcagactactctgatgacaatttcattatgttaataaacttttaatattataacaataccaaactccaacataaatttgggaggggaccttcaaagagagaaggcaaatagtctgaagtcttagtgtgtgacatgtgaaaagatgtatttgtttttttttcttttttaaattttaattagaaagaagattattttacatgttaatcccaggtccctctcccttccctgctcccctgcccccccccaactaatacttatcccataccctttctgctccccttctgtagggggtcttcaaagtctgtcatatcctttggcatagggcctagagtccattcctatgctagggataagtcctgatccactacaaggagccccatagatttccaaggtcttctcactgacacccacattaagggggtcaggatcagtcccatgctggtttcctagctatcagtctggggaccaaagctctcccttgttcaggtcagctgtttctgtgggtttcataagcctggtatgtacccctaggctcatctgtcctccttctctgcaactggatttcagttcagttgacggtttagctgtgggtgtctgcttctacttccagcagctgctggatgaaggctatacgatggcatatgaattagttatcaatctcattattagaagagggcatttaatgtagcctctcctctgttgcttagattgttagttggtgtcatccttgtagctctccagacatagagataatataatagagggagacattataggtttaaagagaaatcaggcactaggggaaagatatatttgtaaggaaaaataacaactcaactttgacaattcttgaagataagagaattactttacttttcctgagtgtaatactaatgaacattgcagttaaaagttaattatgacatcttaaaaataccaatctacatattttactttttaaaatctttattgtcctagaatcctttgtagagtttccagggcactaactagaacaactactaaaaagtaggtcacttttgtaggaagagaaacatccaagtttcatgagtaaggagggaaaggattctaaatgcttcaaatttgctcgagagtggtcccttctgggcccagatgctgcttagaggctcctgtgtagtttcagaggtcttctggattctcctgacaagattcagcaagtaaaaaagagggatgcctagttacatttgaattgcagataaatgtagctttttaaaggcaggtatgtctcatatatatatatggtaactgaatccatattcaactggatgtcttatattttatctagcagtctcaatctggctggcttcccttggcacgatgagagaaccagcaggtgacaaaggaagtggactgaacagtgtttacaagatgttcccttctggctgattgcatcccttggcaggttacacctgtccatcagtcttctgccttcatgttgcgggaacctcttttttccatgcttcttgtgatccagggaaaatacatctaacttgcatgctctgggtcctacctcattcaggggcaccattaactgttatttctctagtttgttgcacttcccaccatactacttctatgccctattaaaaatttcttaaatagcttgagtgggcatgccgtttcctacttgcatgcagaaacagatgatcttgtagacacccagtctctgaggtgtctttctggtggtaacttcaatttctcacagcactggaaatattgagtctcaggctgcatgaggtactgtgtgcactgcccttccctttccagcatcaataccactgggcctagatttttttttttttttgcttcctttacacaatgtcttggtttcagctattacaaaatttatgcaaaattatgattttgctctttgagttagcatgacatcaatgacaaaaaatgtttatatgtaatgacacaaaagctttagacattccaaagtgtgatggggtgtctagaaattggtattaaagcatatggtggttatgatggcaatcttacatgtcatatttgctaagtcgagatgcctatatagtcaaacatgattctagatgtttctacaagggtgtttaagatgagacatatttaaacttgtggagctgaataaagcagattgatctcctgcatgtggacaaggctcagctagtgtgctgattagctctgtcaacctgacacaaactgcaatcactttgaaagagcaaacctcagtctttcatcagactggcctgtggacacatcttggtggcattttcttgattaacagagggtacggctgtgggtattgtcatctcttggcaagttgtacaggaaagcaagctgagcaagtcatggggagccttcgtaaactctcttcagttcctgcctttaggttcctaccttcattctttgccttggcttcccttaatatagattataaaatgaactctttcccccagaagtttgttttgatcagtgttttatcacccaacataaaacaaactaggtcaaccagctaaccaatgacttaaatagaacaaatgacagacctataagcaagaaggaattcttccttacatgttctttggacttgaattctaatattggcttttcaagatctccaactctctagtcagcctgctgattttggacttgcctgtctcaattactacctcaggatacactagtttgcacactgtttttcttcaagaggtaaaactactggattaaacaatgtgcattctcttaatttcatgcaacaaggagtccaagagtaaggtatttgtaacatgattaataaaaacccagagactgatgttggggttcaagcttcaagctgaagatcagaaaagcaaagcagccagccactagctcttacctctaccttagactaaactgatgatccagctaactccacaaatcctgagactgcaatcctagactgctgtgccctcctcaacgaggttggagattgcctaatactaactttgcttcttcttttatacctctcaaattctaggattaaagcgtgtgatcccaaggggtgagatcacctttgtgtgaactgtttctctttaggactcgatcaatttcgcatagctcagtgtggtcttgaactaacagagatccatctgcttgtctcttgaatcctgggattaaaggtgtgtgccaccaccacttgacctctatagcttgtggctagctttgcattctgaaccctcaggcaagcttttataaatcataaataatgtatcaccacagtataagtctacctagggcattgtccaggttctgcagttttcttgcctcttccctcaggttggctatataacagttaaagatgtttcaggcttcacattcagacccaaaatgttcagtgtggctgagtctgtttcttacatctgggaatctttttctagtagctttcttagcacagtctctgctttgtggtccctatgtctgttggcccaacaagactggagtctatttacctatgtctgaggccagatttctccagattctattgggtggtcacttgaggggaagcagggtactcttggtggaaagagagagagagcaagcagattttgggaaggcagccagtataagccacctgagggctcacctagatgttgaactttccttggtcaacatctaggtttgagagaagaaagtgaggtctaggtatgggctgctagaagagatttagaaaggaagacatactcatgtatggacacagagacacctcaaaattattcaaatactctttggatgtaggtgaaattgactacttataggctataattattttactgtatatgtttacagtagcataaggatttaataagacatctttacattaatatttattggtgtgaattcatataggtgcctagtaggtgtgcctttattggaaatgtgaaaaatatggataaattcccaactgaatctcaagcactataagaaaaaaatgcatttttaatgccgtaccttgagccaccaagtataattcaaattgtaattggcaaataaggagagatacaggatgaatgtcaggaaaagtgttttcagcattgtattctttaaaaggacttgattcacatctttattaaaaattttcataaactcacaaaaggtccaattcaagtagtatttcacatggcaggtgataagataccaataattaagggctgcttatatgagctaagagttgcccacctaaaagcccttagtattgcttaaaggaaactaattgcatacttacatagtagcttttgcaaaactgaagttcatcagacaaagaaatgtttgtaaagcagctcaagaaaaaacagaaatcttaaagtgttttttttctgtttaagccaggtgaaaaaaaaatgttgggaaaccataaagagtgtgtcttgcagatacctttttcccataagtaatttaaagtccaaatgagtgtgtacaaagctcttttgcatcacaggggagtgttgcactttggaaagttttatagttcaggataatgacaggcaaaggtggaggctaaggcggaggatgcaggaaggactcaggaaatgaggtgatgaattttttttgagacaggtttctctgtgtatctctggctgcccttgagctcactctgcagaccaggctggcctgcaactctaggtgatgatctttaactgttttgtaacatgggaagaaatataagtagaaagatgactcaagggtaatggaggagagtgatcgaaaaggaaatgattggggaaagaatagcagtgaaggtgctactggaagtgttctggggagagatgagtgtggagagaaagcagcatgcagaactatataagacgtagttcaacatgattagttagctgggaagggcgctgcataagaatccgtgatgaaatcaatggaagcattaacagtgagaaggaatatcaaggggaaagcaggatgtgcatcaaaaggcatcctgttccagtaatgtccaacacatattgggacatcccaaaagttggaatccacagccactccaggttccacaatggaaaaccaagattttctccaaagagttatagtgccactaacaaacatgtttaatgtctcgatcatgtcaagctaaagagctgatgtccattttctactgttcaatgttgaaagtctagaaaggtttaaagagtccaccctggctgtttccccatgaataatctccctcccaccctttcagcaacagcactttaggacagagacaatgcctaatagtctacgcagaacaactccttcccagtccccaaggcttcaactgaggttagcccactgtcagaagcatccaagactcttcaccatgtcaatgacttggggtaatttctctgctgctttctctggagtgagaagcatcaaggttacttccatcttctttcttttgttgtctcattctgccttccaactactcatctccttgtgttctttctttcacggctactgtcttgatacttagtaaaaccagaaaccccaacaacttcttattctatgtttctgtgttacaaaagagctttttatgcactcgttaaacttgtttatttgtttgatttttggaaacagggtttctttgtgtatccctggatatcctgtccattagctctataagaccaggctggctatgaattcacagagatctgcctgccattgcatctccagtgctgggactaaaggtgtacactacccttcagtgatgggagaagtccttctgcgtatatgtttgtcttattggttgataaataaatcactgttggtcaataggaaagcaagataggtgggggtaggagtcaaggaggatcctgggaaatgcaataaagagcagagtcaccatgtgatccctaggaagagaggttgaataaggccagcgtcctcagtaagcacttataaaaatatatggatggtagttatggttgataattaagactgagctagcaaataagaaaccctagtgattggccagcagcattgtaactaatataagactctgtgtgttatttgggggccctaatgtggtggcggaactcaggaggctggcagaaagagttctcattacaatttggcttaccattgaactttaaactgcctatggaggttatctgcaagaaatatttgttaggttcttttctttgcctggtttaaacagaaaaatgttttcggatgtctccattgtatataatgagaatggggcctggaacaaagatctatgggagtttgctatggtagatatgcagttttcaattcaaagaaacaaggtctgaatttacaaaaacccatgagaaagttatttagggatgatgctgtgtagacaacagagtttaagggctggacctttggagttgctttggagtttgtccaaagaaggagtctaacttctttcaaaataagatgtggttgactatgagatatatggtttccaggaaaccaaaggtcctcaaggtggccttaggactcagacaagtgagagaatgggaaaatatgacaaaatgagcttaaaagcctgttagtggaatctgaattccagttcgacagaggtgggagcatttcccttctgtattccccaagactctgatgaaggtgtacttcagaatgacttaatgactgagtaagtgatgcattgctgaggtagactaggaagttagtgagatagatgaaatgaaggaagtcttaagagtttagaaaaactgaatacacaattttgatatgtgtttaggagttcatgtcttacagctttctgtgtggaaagtaaactgataattacattcaggaagtgtctacttcatgaatgatggacatactaagaactcaccttttactattccctgtcttaaaagggagggaatttctataattcaaatgtctatgggataccagagtcaaaagcattctattttgaggacttcaccaggctacatttaaaactgtttgcttcaaaacacataccatcacctgtgatatgctctagctaaatatttaacttgaacacagaagctgttgcttctagtttagtttattggagatacaaaagatagaaaaacaaacaaagatgacaccacatggaaataaccagataaatatagaagataggacattctgcaaaacagttggcccagtttatttaacaagttgttgagatttaaaagaaaaacagtggggtggttctgctacatcagaggagaggggtttagactggatgactcttttgacctaacaatttccaagagcattttataacattcaaaggcactgggctatagactgggcatgagaaataccaaaatttagttttatggaagttgtggatcatttagcaaataaatcagtatttaaagtttttttggtaaaaatgtcacatatgcttataattgtataaaaatatctggagcaataaactcttcacaaaggttaggcctggtttgtgtgagaggttgttttactttgttttgtccatatatgcttctttagaatgttacaaaccttttttgttgttgttgttgtttggatagttaaaatgaaaagcaactaaaggtgccacttaagaagatacttctgtccttaatgccaccaaagaaatgaaatgacagcctgtgttagttttctggggctgctgttagatactatacggtgaggtacataaacaacaacaggactttgttgtccaactcttctggatgctgagaggctgaagtgtgtgtgtgtgtgtgtgtgagagagagagagagagagagagagagagagagagagagagagagagagagagagagagagagagagagagattctttctgggggctatgatagggaatctaagctacacctcttgttggcttcttgctgcttgctggcctatcacttggctctgtatccatctttacacaagttttacacatgttggtatctgaatctgtctcttcataaggacctcagtgatgctgaatttaaggtctcctacttcaatataactcattttcctaattaaacatacaaccctatgtacaaataaaccccctatatattcactgccatagatctgtatggtttatttaaatccagaatcacatacccataggctaaacacataaatgtcttttttattaaaaatacctccacttctgatgacctctatatcggggaatttgttgcttagctttgattttttagcacatctgtcactaagggaagaacttaacctttggggaattagtattgatcctatatgcaggttttttttttgcttgttatataggatgcagacaggaggattcagtatcaaaacatgtttgtttgtcttttttgttgttgttgacccaacaaacaattccttgaaatgttaacttttaactctgtggcctgattaatatttaagtctggctccctctactggacaatatgttaacttccctccctactctttgtttttggttttggtttggtttttctgagacagggtttttctgtgtagcattggagcctatcctggcattcgctctggagaccaggctggcctcgaactcacagagatccgtctgcctctgcctcccgagtgctgggattaaaggcgtgcgccaccaacgcccggcccctctctattcttaaatggagtccaaagagcaaaccacaaatagggattcacaaacgtcattcatctgtccattccacttccttgaccagctgtggcttgtaagggtgggaaacttacttcataaactacccatctcttacccaccacaatacttcaatcagtgctaacatttaactcagtccttaaggtaaagacattcgaacatgaccttaacatctactcttaccttcagtgtgacagaggttgccgcactgaacagaggttttcagaacaggaaaaaagccctagtgattttcccagcctaaatctccatgttcctagcaaggaaggccagatacagagaggggtgatttcctccaattgtgtaactttaagattttcaacgtgcatgtatcgggaaagaaggatgcacttctcaaacactttacagtaaatccattcaagttatcataatgttttgactgcctctggttcatcagactctcagagacatgcaaaggcttgtgagaggcaatctttgcacctcaaagagcttactgttaattaaattgtttaaatgatgactttaagattaaacagagcagccaggtctacaactccaaatggccaattacatgatgttttcaggttaataaatattaactcttggcagatgattgataatttatttgcataatcttctccattaggtcttagtgataatacaacaggttttagattttgaccatttttttcctgtactagaaatcaatggcttttgaatagagtactgtaatcatacatgtgctggagtggggtttcaaaatttttaacatgttaacatgtaaaatgactttagactgtcctggtgaatgatctaaaagttgcttttggtggagttattaggatctccctaaattcacttgttccccagaaaacatatctgaatatctagttggtctacttgtctcaaccttcatccatcttacaatgctaagaatctactcaggtgttttgtagtcagaaattttatgcccttgtatgcatatatagaccttcacatggaattatctagtaagcagagggatgaagctcagaggcaactctggctttattgtttggaccacttgtgttctcctgcccagagaaacatgaattgtgcagctgtgtcaggcctcagaatccattcagctcttttgcttgggagccccgttaccttggaccataacttgatcccttggtgcctcatagtcctgctgggattcttgtgatgaataatgaatgggcatgcatgagaccatgaacagatcctggtccagatttgacatatatatatgtcatgaacattattattgcttaatttttatgtgcaaagaagataagtgtatgcattgattccaatgaaggaatcattggaatctgatttataccataccaagctgatttataccatgagaggtagctaggtaaatgccattgcctactggctttggatccatagcggggggagggtattcgccagggagaatgtactttggtaaccataggcaccagggtgagaaatcttagttctaaactaatgagctaaatgtcaagctcctgctattctcatatattttgcttaggagatacaaaaagtattatggaaagaaatccaagtccattgtgggagaaagaaaaaaagacactagtgtcaaaaatcaaagcagatgtatttgagcaacctgaatttattcctcctgcaacgtctttagaaatcacaggtgtctctatttcaaactcatttatgattcttggattttagcatcaaaggcaggagcaattgcaacaaaaggtctctgttcttactagtctccatgtaaatgcaggcgctttcatccacctagctaaagactgcaggatgtgaaattctagagttgcaaatcatcctgaggctcagcagtacttccttttcatcaaggtagatgcaaatgtgattattgcaaaggacaagagcttttctaaacattatgcttttaaaactctgatgagacgcaatcaacagtttctcattctacatccctgatgcctctttttctgcacagcccagaagtcaagctgagcttgaattaaaatccattttctaggctgcttctgaaagattaaaaaaagaagaagaagaagaagaaaaaaacgctaattggcttgcagcttcttcaaagctcatccaaagggttgagttttagatgcttaatcaggtatggtctggaagagtgtctacccaattactgacaaacccaggcctttgatgagttgttttccgttcatgcctgtgatctcaccagagcagatcactggttcagcataagcaccttgtcactattaattgggggctcttaccccatgtcaccattgctgccacctcatttagcattaatgaagccggtgacgtaggcgtcacagctcttttgctgtgcaccagcaatgaataagcccatcggatgaagaggcgctagcttcctggacttatgtgtgttcttctgactctccacagagaagtgttaaaaataaatacatgtgatggtcctgagagcaagtgaaatgaatagtcaagaatagctataaaaaaaaaaaaaacaagaaaaaatgtgagaatctatggtatgtaagtgaagactacgctctccttcccacagccagctaagtgaagcagaatcacctacaagtgggaatacaaaggagttttctcagcctgaaaaagggcgctgtgcaaaggctaactggctaatctcattactggtgaaggagcagttgagtatgtgtcaagaattccaaccctcacctctgccacctaatgctatcctagagattctatttagggacatcaggcaagacaaagaactggaaaggaggaagtaaagtgtctctatttgaaaacagcatgctcttatatacagaaaaaattagagaatccatcaaaagccattatgactaaaacaaattcaatcaattttcagaatacaaactgtatttcaaaatatacgtgtgtttgtgtgtgtggcatttatgtgtgtatctgagtgctctagacatgtgccactgagagcctatggagatcagaggacaacttttagaattgggtcctctccttccactgtactagatttttttctttaaggccatcaaccagctcccaaatcatgacacagagacttattattagttttcagtggtcatcctagcttagacacgtttctggctagctatttaaaataaacctgtttatctttcttttgcctcagaactttttatctttacttgctttcttgctgtatctttgtctggctggctggctgctgcctggcttctcgcccttggtgtctcccctcttctcttgagccttgatttctcctatttatttattctctctgcctgccagtcacagctatcattttctcctccctagccattgactgttcagctcttatttagatcaatcaggtgccttaggcaggcaagggggaaacaaatgcaacacatatttttgtaattaaacaaatgcaacacaagcaaaagtaacacacctttacacagttaaagcaataatccacagcataaacaaatgtgacacacctttacacagttaaagtaatattccatagcataaacaaaagtaacacacctttacacagttaaagtaatagtccacagcataaacaaatgtaacacacctttacacatttaaagcaatattccacagcataaacaaatgtaacacacctttacacatttaaagtaatagtccacagcataaacaaatgtaacacatatttacatagttaagtaatattccagaacattctgctaagggattcaggagtcaaacccaggtcattgacttgcatagtaagtacctttatctcctgagccatctcactggccctcagctttatttttatacaagtgtaatgtgcaacctgaaaaagagaagttaaaaaatcaactccattcgtgactgtatcagaagaataaagtatttagggacaaaatgaacaaaagaattgcagaatttctactctaaaaactatggcacatatttgaaaggaattctggaagactgagcggtgggaaaccatccaatgctcttgcagcagatgacctacaccattgtaaaaaaaggcagtgttctctaaactgatctacagattcaacaccattatcatcagagctgcagaaaacatctttgttaaaaacaggtagatttatttatttgtttatttatttatttatttatttttggtttttcgagacagggtttctctgtgtagctttgcagcctatcctggcactcactctagagaccaggctggcctcgaactcacagagatccacctgcctctgcctcccgagtgctgggattaaaggcctgtgccaccaacgcctggcaaacaggtagaattttaagggaccaaaaacaacccaagaaattctggcaaaggatgaaacaggaagatgcacacttctcactttaaagtttacacataggatggataggaactctatataatgcgcacacacacacacacacacgtattcacaccatgcccacatatgtgcatacatatgtggtgatatcttacttgtacaaataaagcctgtctgaaggtcagagaatagagctggccactagctacccatagaggtctggaggtctgtacagataaacaggaagtgaggttggctgggcaaaaatagaatatgagcaggaggaaacaggatttgctctcttgtctgctgggacactaaggaagtaaggtgttgtgatggcttgctctttctctctgatctcagcattttcctctgtatctgaccccaggtttttattacttagaccaataagaattccatttacatacacacacatacttacatacacatatgcacaccagtcaacatacatacatatacacacatacaaccacacacacacacacacacacacacacacacacacacacacacacacacatacagccacacacacacacacacacacacacacacacacacactataaaattcggagtccagaaataaatatgtctctgatcaactgatttgtgacaggtgtgccctgacccttcattgagaatagaatttggtcttcttggcaaatggtgttggcatccaacagtgtagccacatgtcaaaatgtaaatttggacccttatttcaatttatgtataaaaaccagctcaaaacaaataaaagacataggtacgaggtctaaccgtatggagagaatctttagaaggaaacatgggggtaaattttatgatcttcctattcataacatcaaaaccatgaataacaagaatcagagagtctaggagtgagttgcacacacttgtgcatgtactgaggactgaggtgtagcatgaatttccatgagagaactatgctggctcacgtacagaacttgatatctgtctttggtacagtattcagagcaaggagcatgaggtggatcaaaaatactcacttcgtgacagcaaagagggacacagtgaggggatggttatgggatacattctccaagccacaccccagtaacctactttctcttctgggatcccacttcttggagcttctgccactttccagtaatcccatcagtaggcaatcaagcctttagctcaggactttggtgggtggatttataatactccaataatgcaatttttcttttttatattattattattattttaattactcatatttatatatccatcccccattccctcaccctcctcccatgtttcccacccaacccactccacctccccaatcctctccagggatagtaaggccctctaccaaggaccttcaaagtctgtcatatagtttgggggagggtctagaccctccttgctgtatctgggctgcaatagtatccctccatagggaatgggctcccaaagtccatttgtgctctagggataaagacttgctctgctgtagaggagccatagactgtcttgggctcctagctggtacccacattcagagggtttggtttggtccaatgttgtttccccagctttatgactagggtctccattctatcagtaggtcaggtccaccatttctgcaggtatctccatccccatcttggctcctttgctcgaccctcctccctctccacaactgaattccagtagtatggttcagtgcttagctatgggtgtctgtctattttgcatagcccctcgaagaaggggatggggacaagaacccctgaccaaattggagcccaggggcagggagaagaagagtcttcatccagttgctgttcgaagcagaaacaataatgcaattttcaaacaaagaaaaagcccactgaaagaaaagcaagaagcacataaataaaatgtattcagtaaggcagccgtcaggaagatgctagcctttgcattctgagtagtagtgagagagggtacctagccatcgggttactcatgacaggtattaatgtgctcagttcacacagaaagtgataaatatacctctgtttttcaccttactcttttgaaatagaagaaattcaaagccagaggccataaagcattctggttttattgaaactttttttcatacaatttattctcatcacgcttttctccattccatttcctagatcatccccacctccccacacaccagatttcatagcctttccttctctctgcagagcactcttaagagagcacattctaattaacattcttgtgtccttttaagcctagtaacagagtaatgatcaccttgtatttagagaaaagagacacaggaaacggatgattgtaccttatctatgctcctaattccattttgaaatctcactttgtctcccactagagagcaagctccacaatccattattcaacaaatgtctattggatctttgcaatattccaagcactgcactgggagcaaactgcaaaatttcagtcttcatagagtttatattctgttaagaggaaacagatcagcacacataagttaatcttggggtgcaattaaaggggggcagtcatgtgaagtaaacaagccatgccatgagacaatgactcaatatgttcccacgtgctacagccctggtgcctggaagagcttctggctcagggaagcaataaatgaatgagtgggttcatcagcaggacccgagctgcatgccttctaaggctttgtggtttgcactttgagctgatttgctttcctttcttctcagctatagacagagtttaatatctgtctcccccactgcttgggtttgctctctctgaggagggatgggataatcgattgcttaagcacaaatgtctctatgatatctgcatattctgtcttcacatgtcagctttgcttattatttctgaaaagctgaatcatttatctttctttagaataattttaattacaacatcttctttaactgtagcttgaggctttgtgttctgaggagttccctactacagctaatcttgatcctcatggttcctagtacttttctattcagtcaagatttattacatgtcagttgttttcaaggaactgtgccaatcctaagggtgttaaataatgatgggcccatcacagctaatgttagcgatcttttctctactgtcaatgggaaatttgatatctagggcctatgcaagattcatatctctggcagctaagattgtttcattcacatccaacatcctcagaacctttccagtggctggcagatgaatatgtatagcatgtttgttgaaaaataaaaaagttgttatccagtaacattaatcaattatatatgcaaatagcatgccattgtaactgattgaattacagcttagaatatctttggattgctagagattggttcacctttttcagaacaatggtagctttatggaggttgaccagatgacccatagcttgacaacagctcaggagcatgttttcctattcagacatcagtcaacaggatgagttacagctggggagaaatcctttcttcctcagaaatgttattgcaccactcgctcacacaccccctcccagctctgtgagctggttctttattttgtatgccttggttagaaactcctatttcttctttttgttgtcctatttcaaaaataaaccaacatcagggtttgttacaacatctcacacacagagtaatttattaggcatgatatcaagttatcaggtaatgataagttctttggctgttcattttccctcattgtggatggaaagagaaagtatgatgtgtcttgttgccatggataccagtcattttagctagtaagatctagtttagttagatgacttttctcttgaatgctctatctacccagaaaactttttaatagaataaattataagtcacattagaagtcattatttacattctcaactttttcctgcagctttacattacttaaatctccttcatccatcttacacccaaaagagatgaaatgaagaaataaaccacgtctgtttttcttcctatcaaagtaggaaaccaacacagttaattctacacagttttatgtaaaggtcacaacaggtttggcccaattgtgataattgccttttttaaaaaaaacttcaaaaccatacttaattataaaaagccatataaccaccttttcagcattccatgggctcattaggagcatctttaaagtgtatgaaaaggaacaaagcactaagcaaattggttgttatatagtgaaaggaatcacagaggcttcaaaaggaaacccaaaagatgtacaaggatagaagaaatatatgtccccatgtgtgaaagcagttaagttcttcctaaaaaatacacattttcaaagtttaaaattctagctaatctttacctatagattgtagatgaatgattttaatgaatttgtaacaacagaactggacaatgggtcagtgagatggctcaataagttaggttgtagcctccaagcctaacaagctgagttcaatccctggaacctacacagtagaaggagaaaattgatttgggcaaagtttctcttgacttccacatgtacacaatggcatggacttaacacacacacacacacacacacacacacacacacacacacacacacacactatttgaaactcttgctttggtccctcagtcctattcaaacttattagtattaaaaaagggatcaggttcactgaacaaattggaaattctgcccaataaacattttctggtcagtttctctggaggctgccatgttggagatgaaaggggcagcttatgtgtcaccataactggattttagccacagctgtgcctccagctgtgtggcttctgatgaattgcttaacctctgtggttttcatttcatcatctgaaattagaggtcagactatattattctctaaagctcctgacatcttcaaatatctacaccgctttgaaatgtatacacatctccatttttatccagttgatacccagcaccaaggctggaaactattcttaaataggcgtactaagttcaaaaccaaattcaaaaaaataagtttcagaagtacaagcctgccagcaactttatttccatcttgcacagcatttaaaatcctttttaaatttacagtggaaaataggaattagcccacactgaggaggatggcttcaaaacatccagtatccatgatgctttccccagctgtgaagtatggcatcataatcctgggtaataatagcctttatcatttcttagggcatgccagatccttactaagtgtttcatgtggttcaggtcaccagccctcacagtgagctttgaatcgggttttatcctgtcggtttcacaggtgaaaatgggcaccataagaacagagggtagtctctgtcctaaggtatccagctagtgcatggcagagtcagaatttgatttcctgctggtgcttttttccaaagcatagaaacactaccctgcatagtttccagtcttctgcgtttaagtggaaacccctgtctctcatgtactctccaccccagcagccctcttgtctgtctgacctcatcctcagtgaaggacatcagaaaactggaaactatgactgtcagttccctttccctcgtcacccaccttgccagcccctctcactaagttccatcaacacagtgcatttaataactacaaatgggtgtgtggccagagtcccatggcaagcctggatgattatcaggtacttagatgaaggtgtgagaaaatcaagataggctgcagaaaccactggaagactgagggactaacaacagtaaatgctgataacttctgcttctgtgataggttaaagtatcacacacacacacacacacacacacacacacacacacacacacacacacacacacacacacacatgcacgtgcacgtgcacatgtacactgatatattgtggtcctaacacccaatgtcttgccatataaccttgtttggagacagcctctttccagagctaactaagctaaaatgaaatcttgaatgcaaacctaagtccatactgactggtgtctttttgaacagggaaagtttgacacacaagatggggagaaacctgtgtgaactcagaggcagagagctgaatggtgctgtaagacaaggaactccagatgtccaagggcatccagaaactggaccatttggagccgaatttttctgaaagccttgagaaccaacctggcatgttcatctcagcctctgataccttgagacgctatagttctggtattagagccactcgggatgcttcagtctgaaagtgctgggattccaggaggcaagcaagagctatggctgtggcagagggaccacattccatgaggctcggaccagggaatatatttctgagccttttcataggctgtttgcttactttgaataatagaatttatatgggaaaactgcaatacatgcttgattgattttctttgctgactagtttccagaataatgggtggttttactaataacttgctttttgatatgtgatcaagcatgttttgatgttttaacatacttaatgtattacatctattgtatgctattttggtgggttttttttataacactaataactactagagacaagatcagcttagaagaggaagtgtttacttgtgagttttgatggttttagtccatgtcagttgacctgctattttgggaactatgcagagactgtgtcatgcaagaacatgtgttagagaactctctcatctcacaggggccaggaagcaaagatgatgaaggtgctgagatcctcacatccccttttaggacacatactcagggacctaatgccctcctgctagacaccacctattaacgtttctaccactttccaaaagtactgggaccaacccttgaacacatgggtctttctgggacatttatccaaaccatggcaaggcattgccatgtttttacttaaattatctctggcttggacccaaagtgtctcttctgattacatatatgtgtgtgtgtgtgtgtgtgtgtgtgtgtgtgtgtgtgtgtgtgtgtgtgtgtgtgatcttcacatgacctagagcagcggttctcaacccgtgggttgtaacctctttgtgggggtcacatatcagatatttacattataattcataactaatagagttatagtgatgaagtagcaataaaataattttatgactgggattcaccacagcctgaggaactgtataaagagtcacagcattaggaaggttttctgaaaacattctctcaccaggagggcaaaatgcctaagctcatcttggacatttctcatcctggacctgagcctcgtcaattccaaggagttctagcttggttttgttttcttgtttcgggtttttttgtttgtttgtttcttcaggaaatgacagtgaatacagaatgggcattgtcttcatccctagaaagaggatattacctttttagatgacacctggtggcagggtgatggagatgagatttttctctgtgaatttgaaggatatgctatcttgcttctgctatcaggcacctggattgttgtcatagccatgcttttccttaataggaccactgcgctaagtcagaaaaaacagaggtccctttgattacttcaggtatgaatcttttagtaaggaaaggccctgtgtagaattccataacccccattcaaatattaaagctctcactctccagtgtgaagcatttgggagtcaaggcctttgtaaggtggtttgttttacataaagtcataaagagggttctcgtggtagaattagcaccttaagaagagacaaaagctctggatatcctcccttgtccccccaccagcacacactgagaaaaagtcacttaatattttgaagacatctgtctgaaagaaaagaggatacccttgccataacagaattacctagtactttatattaagtgtggctcagttggagatatgtcttggaggtgcaaaaggtaaaaagggagcagcaggagattttacatgttcaaggacatatattctttcatagtgacatgaagtgatacaaactttgtacatgtgaatgaagcaagtgttctatagcgaaaatggaagaagaaacagcatggggtgtaatctgtcgaatgggatgggtgggggcaaggcctttggagaagaaactccccctctcttctcttccacccaaatgtaactccagagattcaggagtgggatatgagctagagctatcttttatttagagtttttttttttcataaaatgacccttttcatctcagatgatttctgtaataacagctgtaactgcaaaccaaaaatctttacatgtggctatcaaaaagctctgtgtcagtttactgcataagatatgggtcttactctgtaaaaattcagacttggattctgctctaccagtggaccaatgctgctgcctccaagcaatgagaaggcccttgagataggagtaaacctggtgagttcaaattgtagaaggaagactgaagcatcattgagatgaacgaaaatgagagacagaatcagaggcttaggtggatgataataatacggaagccattttaggccactgtaaaaagtgtggatttactctaggtgcagtgaactctctggtgaagcaggagagccctggaacctattttccacttagcaaacacttctctggctgtcatttggagaagaggaaaagaaaaacctctattcaggaggtcatcacagcttgtccaaggaattttagggttcccaaggattcagtggggtagatgaagagaaacagttggacaagggatgcccttttgaaatagtataaggtttcccaatgggtcagaaacggggttggggaaagggagaacataaatgaagatatcttcctagctctggaagcaatgcagagatggtggtagctttcagatgggggaggctaaggaagtaacatccggtaggggaaaatgaagagttttcttgatttgtatgatatccaagtggaaatatttgtcatggctttgcctggaatctctgttccagtcctgaatccaactaccttcccccattctcttccacaagttttccttggtcctactaacctttctaaagcttggctgaggtcatgcaacctaaaaatactcagcatatccttattgtctccagacccacaaacaaatcttaacttgtttttcaattattacaactggggtccaggcattccctttctgcactgcctcatgtaactgccatgtgtctactatgtttcctggtcaactgggtgactttctaggcactaaacatacctttggcctttgctcaggtttccctcatttgggaatctctttcccatcaatttggatgattgcttatttttcaaaatataatttgattgatggcagctgtcactagattttaggaactccagtagtcaagtgagatcacattttctatccttttacaatgtgttgttaagattatatgtgtgtactaggattccactgggctctaaagctactaacatattcatttttcacacaatttaatagaaaactccatgatatgtctcagtgtttagctgtgggtgcctgtttctgcttcagtcagcgactggatgaaggctctaggaatggtaaccaaggtccagttgcagagagggagaagggatgagcaaaggagccaagatggtgctggagaaacccacagacacagtgaccttgtaagagcacggagaccctagttgtaaagctggggaactagaattggactgaaccaagcccttggaatgtaggtgccagctaggaggccaagacagtctatgggacctctaagagtggagctagtatttttccctagagcacaaatggtctgtgggagcccattccctatggagggatactattgcagcccagatacaggaaggagggcctgggccctcccccaaatgatgtgatggactttgatggtcccccatggagggcctcactatccctagggagggggagtgggttgggagggagcatgggagaatgcaagggaatggtgggatggatatgtaaacaagagtgcttctaaaataaaaaaaataataataaagaaaactccatgttaaaagcaaatgtgctttctttttccctgtgaattttgacatgtctttgagacttataaaataaaattctaaattaatattcagtggtcaagcgtagtgcgcacacctgcagttgtagcacttggtaagctaaggcagaaggatcactgaagtgaagagtttgggaccagcctgagcaacattgcaagtccctcctcaatgataataacattttaaaaaactgaaaaatcaaattatcttttgagtcaataatagatgtgtatagcaagcaaatagctctacccagaagatctaccagttacataattttaggcttgtaagatcagaaagacatttacaggccaatgataagaaaatattttgaaatctcccaagttgaagattaatgtcattaaaatgagtcacacagatgaagacttgggatcaaaaaatccagctgtcgcctatctgaaatgcctatcctaactgctcccaatagttttagaatagactgttcactcccctgtgaattctgttaggcctaacaataaataattttctttgctaagaaatgttttccccttaaaagtgaaaacctgtgccctgattacttttgatggtaagtctgttgctcctactacttagcaatcattcccaacagttaatgatgaaaggggctgttatggtatctctcacattctgtggagtgaccagggtagcttcctcagctccatggtatcagctatagctgctgtcatatggagctttgtctggactcagccaccatatacttagagggtcaacactgacttaatgggagctctggaggggatgtcaaacagtgtttcctgaggctctttcccacattagctctacttggttctagaggttaaggtggctatttcactcaatttccactacccttggagcagtttggatggcatttcatgttatcatcaatggtcaaagatgcctgaagccttgatgtattaaccaaaggaacatatatctaactttatatggaatgaatgcctcttgattagaaaatagaaaacaaataggaaagatccaactgtacccccattgttccagaacaatgtttccggagcagaggttataaggtagtcccagggccatagagacttggttaaaaatatatatagcacaaacctagagcaaatcacttgagtttgaaagactgtgtttttattagaaaccaggctataatggttgttggttgcagaagagtgactgagataatagatgcgattgcacaacacagaatgcctgttacataacaaaatgcctaagacaattttaaaatcttaatttcatagtcctattactattgttaccattagtagtgtaaagaattgtattctttttaaaaagttaatttcacaacatttttcacttggggcatctagaattaattttattagttattttatatcatattatgtacctgtggttgggataaacacaatatacctcatacatcattcgaaaactagtcataataaaggctagatgtggtggcttatgcctataatctcagcccttgggaggttgaggcaggagaattttatgagtttgaggagccaacctgagctataaactaagttccaggccagcctgggctactgtctcaatagaaagttggtcttaatgcatgcaaagtgactgggagcaccagcattcaacagacaacagtgttgctgtaacagggtagtgagcaagaattcaaacccagaacttctgatatatgttctattgtttctttttccatgacctcattcacagaaaaatttcctccacaattttgaccccattccccctatgtactctagttacccttctcaatgaatgtgcaaactggaaaataaattctccaatccctgaaacattaaggttattttttaatgatcataatgatgagacattgtaagatggcatttttcaaaatatgttaaggttctggtttataaataaaggaaaaatttcaagagaataaacaaagattaaatggaacatttgtaatcaattaggtcttggtgcagtcagaaattctgagggactgattctgggtccttatgggtgctggaataagagggacacaaactgaagctttagtgactctccctaagtgcccacagtctttctggaatttaagatgtatttatagtttcaaatgctcattaataaataagccatgccaatgctgtggccaatacaatcaagaaaacttatgaaggttcataaatgcatagaacaaggaatctatctcattaaactttaggaatcacaaaagcagaacacactacttacaggttttttttttagttttaaaatcacatcatttatttattcattcattcatttactgtatttgtatgaatgtatgtgtgtacatgccttggcacaccttggtggtcagaggacaaattctaagactcagttctttctttccagcaggtggtttctagggatggaactcaggcagtcaggcttagaggcaagtgcctttactacctgagcctcctcaccaccctgactactcagatattttaaagaatgccttgtatatgagtctagggaattcaaagagagagtgggattttaatagtaacatcattgaataatgacagagaaaaggacatgtcaggtataactctgagttgtacaagaacaagtttttaattttttttgtgtgtttctggaaggtataaaagttccccattcgacgaactcctatcccactgttactattttagagatccatgggttcaccttccccactttatcatattatctgaatagatgtgtgtgacatctgcatgccaacgctccctgcagagttcttggtagaggagaactggtctccaacttggaagcagaccaacgccctggatgagcatagtttaaacccttatccctgcatctgagaaaccagggtttgctcatgtatctaaaatgatctgtgttttgtgtgctcggcaattcaaggagttgtctttttcttccttcatatattctacttttctagttgaggttaggctcagagctcctttagttctgggcctgggagtctgcctggcaattgcaaccccagagccactgttttctcacaaaggtgcctttgtaacagggctccttgatggcagagaaacccactggaactgtctttcatcagctcttgggagctgtgacaaggcttctgggaacttacaccaggcattctgattgtccagtaaggtttctatggctacatggtccacactttccaatactgactttggaacacttggggaaagctccaagaaataataactgttctcatgagagaaatgtcatttcagaaattactgtaaatcacttatatctgagaactcagtgaaatgtctcatgtcacagagagagttcctgacttagatgggaggtgccacatggccagggtttacactcgctgatgaaatggtctggggataggtgatgcccaccacatcagagtttccaaataaaatcatcccaatatagtcagagggccaaaggcaggggccaagcctacctgaagtataagatctagtccttaaaagtttgaaaggggctgcagagacagcttagtggttaacataacttagtgctcttcaagatgatccatggttggtttcaggaacccacatttagcagccaaaaccgcctgtaacttcagctccaggggatccaatgccctcttctggcatctgtgggcatctgcacatacatggcagagagagagggagagagagagagagagagagagagagagagagagagagagagagagagagagagagagagagagacaaaaatggtttgaagagctagtaagggttaaagcacagaaactcaacagtgtatgctgggtgtcgacaccttaagctcagagtaataagctcctgccttgagcacacagggaagtaaacctctggttggaacttggagctattccttaagactgggaagtataaacctgtgagcttagaagcccagcttatgagcctcagggctatcaacacaaaggaagctgctctgtgtctaccaggaacttgtacctggatagctcagaagagtcctcagcaagcagtttgttcacaacttgagttgtacttctggtgacatgggatgatctttctgtatgttgtgaatatgtattcctctcattggttagtaataaaggctgatgaccaatggccaagcaggataaggttaggcagaacaatcaaattgaaatttcagatgagaagagggagagttgagagagatgccagccagccagccactgaacaagcaggacatgttgaaaatgaggtaaaaagccctgagacacatggcaaaacatagaaacatggattaatttaaatgtaagagttggctagtaataagcctgagctattggttgagcattaataattaatgtaagcctctgggtgattatttggaagcagctatgggatgggccaggacagagaaacctccgtttacactcttgtctgcagtttccatcctcaggtgcaaggtagggagtctgtttgctgtccctggtaatagtgtcacatcaaccactagctttcttccacctacatttctgtttcactcactctggaagttagactagaataattgacttctgggctatggaggaccctgccttcagcatttagtgactcaatgttctaaaagaggtcaggccctaggaagaattcggaaaaagaaaacgtgacctgacacacactgatctaccttccagtcaggtgaccacaagaacatttgtttcacttcctgagccatagatcaagtctctgtgggacctcagcctcaacagaactgcagttcctcacactggacttgtttcctcagaatgcctcctctctggttcaccttcagacaacctttgtcttccagaaacaaggggatcgcatgcattaccatttctaaccagataagatattgaccgtgcttgtacctcctagcaggttggtgtcaatactcccatttactaaacctccctttttccagattgtttgaattgattttcgtgtttcactggtttgtacattaataagttattgttccacacatgttagtcttgcactgtttgaaagaatttaatactttaaactttttgaatgattatatttaagttgaagactctagggtttttttgtgaaggggaattgtgcctgtgatgttcctgttaaagggttgtcaagctcactgggaactaatcaaaccactagggctacacaggcaactttcaaatgttccatctttgagtagagtggttttatccccttcagaacacacaagagtgctgcgtgctgccgctttagaggtgagacgaaacagcaaatagctttgaatgtggagaaagggcttggggttgtgccagaaacctcaaataatacagtacaaactcaatgaaatctgtgtcctcaatggccaggcttggaagaagaccccctttgcagaggccaaggggtaggacctcattactctgatccttgtcttccccgccatctctctccttcaagaatgttctattatttcctgccatgaccaccattctgctggagtccctttgatctactcagattttagtatttcttcttgagaacacatgatttcctggacattttcacagttctggctaggtgttaaagctgctgagatggtactagatgtcagagaataatggagttcacaaaatatggcctccctcatgagcccttgagggaccgggctttccattcatctttgctttgtatttcttctgtccttgggttcacagtgctggagatcatgatggtcgtgtgtaaaaaaatctctgtgaacctgctgcagatgctgtcattaggcaatgtggagacagcttgtcgcctgaaatggcagtatatagataggaccctacccctcccacatggattctgccatcgagtgtgctgtttcttcaatttttctgtgaacacctcagctatgtcgttagctgctgtaataaacacacagactttggcttgaagcaacacaggtttattatctcactcttcaggaggtcagaatccagcatggttctccctggcaaaaactcacagattcccaaggctctgggagaaaatacaaattcagtccttttctgaatcttaagggctgcccacatttcttgtttctctctcttgcatcctcaaagctactgatgctgttccttgtcctcttaactgcagtcacatctcccccgaccatagctggaaaatattgtactaatgtcagtgagtggggttcaccttgggtgaacagctcatcctggattcttgaatcacatctgaaatgtcccttttgtcatatgaggtaacattgataggttctggagatcagggtatagatatctttggaaggccattctacttactatagtctgctaatcctgagactcaacagagaaagactaattccaccactttgagtcaaatttgaagtgagctttatttaaatactaaatacagaccaaaatgaactttggtcagaaccactccttggaactcccagcctagtggactgagtgttgtaagagcttataaacacaaacccataggccactgtacatttctacaaggctttgctttgttttaagaactacaactcccagcattccaggaagttacctggtccttgggcagatggggcttacaggttaatttttggtcttaggaggcatgcaaactgtatttgaaaggaagaaaaattctacctaaaatatgaaatgacttctgccctccagggatattatataactttgttttcagagtggggcttcttgttttgttttaattttcttaggaaaacactgtgttgtttttattcagtcatttgttcttactatgggtttaaatatgattggaaagtgtcagaaaagaagaaaggtgttccagataactgtacctaagaacatacgtgaaatgtctctcacaatccttggcaactcatttacacattgaggttttcttctctctccttgttaacagggtctcactatgtacccttgcctggcctgaagctcactgtgtagaacagactggcttcaaattcaaagggattcgcctgcctctgcctcaagtactcaagccactacacctagctttacatgctgaatatttaaaccctctaatttaagctttccaatgtgactgaaattccacaatcattctttctttgtgactatttaatgtgggtgtacgtgcatgctcgcacgtgctctcgtgtgtgtgtgtgtgtgtgtgtgtgtgtgtgtgtgtgtgtgtgtgtgtgtgtgtgtattgtattatttctttttggtatgttgccattagtatataagaaagctcctacatttttggttaattttcagcctgccacattgctgaaaacatttatcagctctaaacctttaatggtggcgtcattagcgtttcctacacaccgaatcaaatcgtttacaattaaggatattttggcttcttttcctgtttttagccttttattttcttcccttttcttacaactaagactccaagctctctattgactagaagtggagagagcagataccctttatctggttttgtatccgtaaatacaatacttcataagaatagtttagcagttttcctcctttgtctattttatggaataaattgggtattttcagtgttaattccttgaaggtctggtagaattctagagtgagtccatccggtctcctacccctttgaggtaggagactttattaaatacttagtgctattgctgcttataaaactatttaaattactcatttaatcatttcgccttctgttaattttggtatttcatatgtatctagaaattcatccacttcttttaagttttccaacatagtggagtttaagttttcaaggtatgttcttattattttctggattttattgttaccttttgtaatgtcttccctttctcctataattttattaatgtgagtcttctctctctttgttttggttaatttgcccaatgtttatcaatcttctttattgtcattgttatttagctttttctattgtgaccaaatggaatacaaaatattatttcaattttcctgtatagtatgacactttatttctgtcctcatatgtgaccagttttgaagaaagttccatggactgctgataatatatattctgaactgtttgggtggaataatatgtaaatatccatgagatatatttaatttatagtatcatttaacttcaatgttcctatgtttaattttgtccagctgacctgtctattgatgagagtggggcattgaagttatccactatcgctgatttgggattaatctgtgcctttacatattgtaatatttcttttatgaagttaatcatacccatgtttgatgggaatatttactatactctcttcttggtgtgttgttcttgtaatcagtatggagagaacttccttatctcttctaactaattttggtttgaaatacaatttgttagacattaggatagctatgcttgcttgtttcttagttacatttgcttagaataactttttccaatactcttactctaccatggtttctatctttgatggtgaaatgtgtttcttggtggcagcaagaagattgacccattttctaatccaaactgttcatcagtcttttattggagaactgagatcatcaatattaaaatttttagttatcctgtcattttgttcctcttttgatgttttcttggacctcttttgattaactgatctgctattgcttattaatcccccatgttgtctttggtatatttatctttctctttagtcatatttctttgattcctctttagagtatataaattcctttagtctgtttctatcatgtacattttaaattttcatttaattataatagatatagttttgcttggtataatagtctatgagcttggagtgatttttttccaagtccttttggctttaaatgctgttcaatgttttcgggtgggcctgtctttataagtgacttgatacttttctcatgcagtttttgatacatttcactattctgtgtttctgttatcttaactataaaatgatatggggagtgtcttctgttgtcttttataattggtgttctatagatttgttgcttctggatgggcatctccttcttcaggtttggtgacattttcttctataattttattgaaaatattttctatgtctttagtgtgattctcatttccctctcctatgcccagaagtagaagatttggtcctttcacacacattacacacactgtgtaattcaatttctttttcttgttttaaagctttgatattattttaaacattcccccattctattggtgaagcctatactaaggttaattgagtaatgctgcttccagcatcattttagtttggcttctcttcaataaatctatctctatattgagttttgttttcatatcttaaattgtcatcctccattcattcagctctttgattttgttttcttgagtacatttatatcttctttgagttgtcaaacatagaataatgcttctaaagtctttgtctggtgttgtggaatttttttttaataaggaatactttatttaatctttcaatgatgcattcccattttttatttttttattagttcaaattaggaacaagcttgtttcacatatcaatcccttctccccatccaccctccactccccaggcatgtagggccctcaacagggcctccccaaagtccaccacatcatcctagtctggacctaagcccttccccatgtgtccaggccaagagtgcatcccttcacatgggatgggctcttaaagtcccttcttacaccagggaaaaatactaatgcactaccagaggccccctagagtgcagaggcctccttattgacatccatgttcagggatgtggatcagtcctgtactggcctcccaggcagtatctggggtcgatgtgttcccccttgttcaggccagctatttctgtgggtttcaccagcctggtactgaccccttggctcttcattcctccctctctgcaactaagttccagagttcagttcagtgtatatctgtggatgtctgcctctgcttccatcagtcactggatgagggctctaggatggcataaaaagtagtcatcaatctcattttaggggaagggcgtttaggttatcctctccaccattgcctggattgtcacttcgtgtcatccttgaagatctctggaaatctccctggttccagatctctccttggacctataatggctccctctaatatggtatctctcatcctgctctcctctattcttccctcaactcaatatttctgctcctccatttcctcctctcctctcctctcctcctcctctcattctgacagcttcctctcccctaccttcatgctcccaattagctcaggagttcctgccccttcccattcctggggtccatgcatttttcccttagagtccttcatgtttcctggtttctttggtgaagaggattgtaggctggtaatcccttgctctgtggaatattattttaactaggtaaagatgtgttacatttgtttatgctgtagaatattattttaactgtgtaaaggtgtgttacttttgtttttgatgcatttgtttaatcatgtaaggatgtgtgtttaattacataaagatgtgttgcatctgtttcaccttgcctgcctaaggtgtctgattagtctaataaaaagctgaatggccaatagctaggcagaagagggatagtcaaggatgccacgcagaaagaataagtaggaagaaaagctctacagaaggaagaatgagagagaagaaggagaagagagtgtgggagatgcgtagggccagaagccaagcagacatagggacagcaagaaaaaagaaaaggttaaaaatccccaaggcaaaagtaaattaaaagagctagccagaaatgtgcctaatctaggctgagcattcaaaactaaaaagtctctatgttatgatttttgagctggttggtggccccaaagaaagagcctgctacagtctggaagttctcccaggtcattcttcttgggagctatagaattagtaactcttggaggagttgcattgtttgctattttgctattttctattttgtttctgcaccagaacttgtgtgtttagaagtggcttgttagttgagtctttcttttatttttctttcttcatttcagtcatgtcagctttcttctttcagtgaaaacatttacagtgttcaaaagaagactcaatggtggaactggtatgctgggcttcaggttctatccctagtggtctcctgaaagtcagctgctgactgcactaacagttgctatccaggggtcagaacgctcctacatggtttctgcttctgctgctgtctggggtggctctccaaacctgaatgccctgctttgctttaactttgacccaatcctcgtttccatagccactacatgcagtgtgtaattctgggtactatatgctttactgggccatatcctatatacctccctgagtccacagcttccagtgtgagttgtgaaacttgcctggacatgtattgttttccctgggtctccccttatatctataactccattcacaagggctccatccttaggacctaatagcttctcaaagatcctgcctttttcttttctttttttcttttttctttttttttctctgtgtagctttggagcctatcctggcactcgatctggagaccaggctgactttgaactcacagagatccgcctgcctctgcctcccgagtgctgggattaaaggccaccaacacctggcagatcctgcctttttaatgttgtcatattggggattagggttcaacacatagatcagtggccatcaattttcagtctataatgaaatgttacttattctcatctctgggttgtcatgtgatttaattaatgctaggcacatgcccctgaaagctttggaaaacagaagttcatatcatggggctgtttctgggcaaacatggtaggcagatgtctgagctctttgtagcaattgcagctgtgggctctggtggctttgtgggtgacaagaagaaggatgtagaacaccactttcacagacagcagcagaggtagagggtggatttctgattgtagcgaagctatgaagtgtggctctagaagctgaccctgaaaactcagcgtagggcctaattctaagagagaaggaaggatcatgggtcacatggcaaaacatacatacatataatatatatatatccaccctctggaaatagtcatagccaaaactataagaatgttcaatgattttgttccttgctacatgggaatattcacaaagacagccttatgtcaatacagacagctacatagattggaattgatgcagacaacgcaagtcatacaatgatccctactatccatgaggtcctatggcacatattattttccctacttttaatagacaccaggcttttgatcttgaccacggacccccccccttttgcttagacactttgaatgcaaagtggatatttgccagtagctggtggatggtttctttaaatcagattagaacatgatcctagagaaataaatactgaggcataaactttaaataattagttcatttggtatagtttcccctctcacataatcaatctatagttactgatttttgtcatgtatatcttggggtaaggtcaaacttaaggctatatggtaacttctgctctgacccacagccacaacttccttctatcaatctttcaatactgtgaaatcaacttaagctagcggcctgcagttggcgggtcagaaatacattaaaagtagcagttctagagatgggaacacttggtctttgctggtgagggtacaaactggtacagccactgtagaaatcagtatggaggttcctcaaaagctgaaaatatatagcaaaaatgcagctatagtactcctgggcatatatccaaagaactctatatctcatagagtatgaaaaggagtattttctcatccatgtccactgatccataatagccagaaattctaatagtacccccaatgtcattttcatgtccaccactgggtggcagccagctgccaggtgtcaggttgactcggctggacaattttcttggggctgtaattggcttccccatgcatcactttctaggagtcagctttctccatcacattcttgctgaaagcccgacttaggggctcatgtttgaccatgtgacctcttctttctcaggcacttttgctcttcaaatcctttcttttgtactttgaggactcagtcgctcacgaaccagtggcttgctagatttgttctccaaaaagtaaagtgacaaagaaaccacacaattggtcatgaggactggagtccaagtggccaaagcacaagtcaccaaaggagaaaaagagggatttgactccactgaaactaaaaatgtctatcaaggtacactaccaaaaaagtaaaagacaaccttagagtagaaagtaaatttgcaaatctcatataaggtggggtcaagagtaagggatttttatggtgcaacaacaaataggcttgaatgaattagaatatctaatttaaatatgaggagagggtctaacaaggcctttatccataaaagttggcagggagcatgaagtcagcattgagtagtatctgtagctgcgtattttgaatgagtgtctgctgaaggcttgctatgtgcgtcaggcattaaggacacatagaactgtaggacatagctcctccttcacagtggggcaagaaactggcttgggttacacaggcagagagaaatttgagaggtagagatgtggcttgtgcctggagaggtgcatactctagtggggaaaggttgtgaaataaataaacacaaacaggacattgtatgtaaacagaaactgagttgaaataaaggtgggtttttatgcaagtgatgactattgagccaagtctgtttgatggaaaagctgagaactgcacagatgacgaagccctctggatatagcaggaccaattctagatgagggctcggggcactgcagttctcacacctgcctagtctatagcaataggctgactgcctatttatatttctctaggcctctgtttccctagttttagagatgaggagaccaattggatcatctctgaagctatttaagattttttgcaagttgcttttcttactgtcatggaagatagaatttattaaagcaaggtaggaaagtcatgggggaaagaatacaaattaagtttctatctgatttggagccattattagcatctgaaaaggtgtgtctcacagacttatctttaggggggttgtatgactaacaggattttattgagcagtcgagacagaaggagggagatgcaactccacatattactgatctgactaactaattgcactgtctaactccttggtgttcagacagctgtgactcagtctgaatagcaggagtcacctgaggtcatacaacatatccattgtttgttttgagacagggtcttatatgtagcttgggaagatctccatccccaaactttttgcctcagcttgaatgctgagagagaccacaggccctaccatgccttgctgacataccctgaagaacaccagccaattctccttactgtagtacacacacaggcaagacacaggggaagatgataatgcctttagatggccaaagctctgtagagagacactgtaacctcctaagggctggctacacgtgtgcttgaccacctgtgggcgtggtcaaggggaggtcaggataggttcttaaagggctgcagacacatgggggccccttctctctggccatgctagcttgcgacctgtgggcacgctctggcttgctcttggctggtatttatctgaataaaggtatcttgaatctacaagccttctccgtctccaacaaagcttagcatcctccagtcatacactgtcctctttacctctttagtcctttttcctgcgctcactttctcactgatagcaaaagatcaaaaacacaatgcatatatgaaggttcaactggaagtaagaaaaatgagttttaagacaagagactgaaaagcttaaggaaggcatggctttacagctgttagcaatgccctcaataacctgggttctttttctcccccttccacaatgtcagattgtcaaatgagctcttcttatggtctcaagatggctgcaagccctgatctgttggctccctgtccacctctatagcctagagaaatttcatcccaatatcgcccttaggagtcctgagattactctgcaaatctcactggggtcgaaagctcattgttaatcttcttgaagcgactgtgaggtgaaagcaagctccacagccatggccacatgctgcatgccaacggatggaatggatttttcatttctgaaatcatataactctcctaaattaaatcagaggtctgcctttcactcatatatttctaagaacagcaaattgtttcaggcacaccttaggtttatctccggctgttataccaatttttctaagcctaagcactcctacttatgtcagagtattagctacaaaaaaagaaccatgtggaagagtccggaactgtgtggaagcatgtggtcagagatgcatggacacagagaagtgggcagtggtaaagactgcttttttctgtaatagtgatgaggtgatgtcacaattccaacttgccaaccatctgttgggaggctcctgttgctaaaagtggaatagctgattagaggacaaagatctcagagtctccactcacttctaaccaaaagggaaagccagttggtgccacagaaggtatggtgaccatgggaggaagtgactgaatcatctcggaattcataatgtcagggaagaggaacaaatgggcatgttgagacacacccactggcttgtctttttttaatctgagaacagcaaaatgagctgtagtgtgtttctaaaagggaccctcatttaagaagaatgtatagcttaaaaaaaaaattcttactttgtaatcttgggttatcctaatgagaaggatacagggactacccacttagaaccattcaaagaagatttaggaattatagaaacagaaatttgaaggaggggaacacagtcaaggctgagcatgagaccctggccacagattttgtaccagtgaaacacactaaaaggtcagctgggaataagttgaaacttgaaaaaatattaagatgaaagaggctccttcctacctttttttttaagtgagaagatgaacaaagagaagaaaggttatcagaacaggcagggtcaagttagaggacataaagaagtagaactattttgctgctgctttgcttgtctcagtaaagtagattaacaccagaatcaagcatatacaaagcattcgttatctccaaacatggtgattccggttttaaagttattaggcttattctggaggacatatctgtatcaagcaaataaaagactcaaaaaggcttttgataaaattcccaatgatagtaattttcagacaagacaaacaaatgtagaccaagtcatgaaaaatttagagagattcatagttgactgaacagatgtaccatggtatattgattactggatcagagccatgtggaaaaacaaaggcaaaaggcagagcagtcttctctgctatccttcatcataatattcacggctctgtaaagtgtatccttactacatgggtggctctgtaaattacatcccttttccattttgtggagaaaaacagtgttaaaactgtgactgaaaagagtttgtattcaaaaggtcttcctagattagcaaaagtgaacagaagctaaacgtggcatagaaagggaatgagtgtaaaccctggcattggatttaaacgttgggaaagtagagcacagacaatgtaaggagacctggaatggcaaggactcttatctcagagccacagatggtgatctgagttgatgaatggaatttaggaagaatattatcaaattacagcttcatcacaatggcagtttgggaagctatgccctggactcactgctactggaggaagtatcgggttttgcttgtcacataaagcagaatgtaatgtgaagaaggttctgaagaaataagtatgtagagtatgtgcttgggttaaagagaacaccttggccattatggaggtctgtccgactgcagaagtgagaagaaccacagctacagtgactaggctcctcaagcctaagcctgaagtgtgagtctcatcttgataacacaggtatgttatatttgaatagataatgttttcagataggcccaagattattctcaatgtgtattcgccagaagatagcaatatggagcggctgtagaaattgaggcagtaggactgaactgaaggaagcaggtccctggccagttcctgttattctcctcctgtttgctgtccactacagtgtaaacagctgttgttgtaaaatattactttaagatgtctttcatttatttatgctgtggaacatttgttttaatgaggcaacaatgtgttgcatttgtttaactctgtgaagctgtgttactttgcctgtctaaaacacctgattggtctaaaaaagagctgaacagccaagagtgaggcaggaaaaaggataggtggggttggcaggtagatagaataaatagaagaagaaatctgggaggagaggggaaagagcaagagaacaaggagcggaggatgctgggcgctagccacttagccacacagccagccaaggactaagagtgaaagtaagattacagaagttagaaaaggataaagccctaaaggtagatgggataaattaagaaaagatggctagaaacaagccaagcaaaggcctgtcacttataagaaagaatatgactccatgtctgttttatttgggagctgagtggcgagaaccccccaaaaagccaaaagactgaaacaaccaacaacaaactgtcctccatcaccccagcatacctctgtcatgttcctccacagcacatgggaccaagcagctaaggcacgaaccctatgaaacgatgagcccaaatatatcattctcccttcaagcggttctgggtcacagtgacaaaaagtaaataatcaagagtctaagtactaaaaagtagaagagggtaggtggagttctatttctgaggtcagacctgatttattaacacacttgatggacaggtgctcagggtctacaatcgagaacagatgatagaaggccggtcttcaatttccttgtgtctacctatgggcagaattctgtacatctctgtccttttcctcatctttaaaatgtaccaaaggacagtatctacatatacaattattagaggaattaagatatatgaagtgcatacagttgttcctggcctgcagcggatctgagcaaacactcgcaagtagctattgttagtcaaactttgtgtgaatgggctataagaagtcagaaaggaagaaagagtcacacagagcacaacagaggcaaaaaaaaaaaaaaaaaaaaatctaggggctgtgcatctgaactctaactgactgctgctcttggtcattctgaagcatgccaacctttgctcctgccatggcagcaggatggagtctacaaggtcctcattgtctgaagcctccccccttcacaaaggccctgagtggtgctcacaacatttggcttttacattccattttcttaactattttctcatctcactgcatcaagtttaggtgctgttttatagatgaatttctatctcctataacatctggcagagatgcataatacaggtaggctattccaagctcaatacagctctccaggatgcatagaagactgttttcagggcttcccctcccccatggtgtcaaactgcagacgttcaagtcccttttatataatagtatagtgcttgcaattaacccatacacacccctcccctaaactttaaatcattttgacgttacttacaaaacgttttacaattaaaataaatagccactattctgtattgtttaagaaacaaaagaaacctgttcattcaggttcagttcagacactagtttacctcccatatttttgatcttcagttggctgaatccttagaaagtaaaggctacacaactgaaagaaggctaagctaatgatttggagttttgtagcttgtcttggggaaagtggtggcacctgtaatgatggcagatatatacataaaggggaggttactttgactcagaagtttatgagttccaatttggggtacagtgagttcataacttactttggcttaagtttttaaaagcattaaggcagaactctattctttggttacttttgtcagtctctcttacgtcaggcacagatgaaagtattcaatatattacaaaaatattccccatgaagaaattatgttttctgaccatatggggaggtagtggagccatttgtagttttccaaagagagtactgtgaaattattaaaaccctcaatgctcatggttgggttggcatatgactatctggcatctagtcagatatgtgcactgaatttcgacatgacatttaatgcttgtggttccctgcagtgctgtttttcttttcatggtgataaccttgaagtcacctttgggagacatgcccatcagtgggcaattatgaatacatggaactgtcttttattacatctggttttgaagacagctcaggaggagaaggcagcgtgagctctcatactcttctcaattccccctttgcccataatgatttgtgtaccatctcaagcacccacacagggagagaaaaagaatatgatggagtgctctttattatttcggtaaatatggactactcaaccaaccaccagacttgcagacagggtgaaaagaggaccatcagtcccacacacagtgtgcaattatcgtagctacaaatcaggagacattctaaaaacatcagtttgctttgggagagaaaggtggaaaccaaaatgcagtgtttcacttttctagacttaagagatagttttcatgactctgatgtgtgtagaagccagcaactgaaggaaataaccaagcaggtagaaaatgtaagtctcgtcacaggaacaaactgaccatgtggaaacagtcaacagactgatggctgatagaaaggagccatgagcagagctcagagaggaatgccatggggccgtcacctcaaatgcctgagccaggcctccttgttttgttgacactggtgttgaggaaaaaggagatcacgaatctgattatcattcctcctaatatcaaacatctgcccaaatgtaacctatttagttcctggctgacattcagcttgtgtggctctttccttcatagtgattatgaagcatccctactggtgactgggactcactaatgtcacagaacagtagtttggaggctagtttccaattctttaatgacaggtccccttcactgccatgaggatctagatattgacactccaagagggtggccaggcaagcccatgttccttgtggaagtctcccaaatgagacctgttttgaaaactgtttttagaatattagaatgaagagttgaacaaaagggtacaaggctaaggttaaatacctctggctgagagggaaaggggactgaaggttgttttttcaggaatcatggtcccactaatgcaccacagctgttcaaacagaggtgctaacctcaaccagcttaaccagaagtgggtgaaaaataatgttttaaagaagtgacaaggtgctatctttaaatttgaaggagtgtgtaatgaaggcagattagattagcaggagatcctcaaagacactccttaaaccatagctattttgcttaaaatttgactttcctttgatttgttgctcataatgggttttccccatctgagtctgtgagatcaattgtgcattgcatagctagttctagggagattctaagagatttgggggcaaatccacaattaaccagactctcggttttatcttttgcctaaaactggactgatccttaaaccattcaacaaaagggaagcattcactctggtcagctctgtttccacaaccacaaacaacggccctgtgaaggttggttacagttatctcttaatttgcatgtgtgcttgttcatgtgtgtagatgtatgctatatgtaatcacaaagataaccttggatgtgattctcaggactaacacccacagtctttgacacacggttttggcaaccctgagctcacaaattacactagactgactggccagtgagccctgaggatcatcctgtctcttcctcttcagcactgggattacaagctcatatcacacaaccacactcagctttgttcatggctgctggggattgaggtcctcatgcatgtgagactagcactgtactgactgaattatctccatagtccttggtggggtcgcttgctgcccagtcctcaggacagggatgcatttggtttgcctctttatcagacaatattttcctatcttccctaacttttttaaggatcagtgttctactggcagcatcttgaggactgagtctctggcatctgtcttaatgttttctccatccttaccttttctgttgtggtattcggttcacaaacatttataggttcttagcagaagtaagagggcgtggagtgatgggcttcggtctctcacttacaaaatgaatgctctgctatattagggtttacattgcatcactttaaatgttttttttcttttctacttgatcttgagcaatgtatttttccttttcacctcttcctccctcagatgcaagatgtgttacaagcagttaagagtttagtgcccctgtagcaggcagcagtagatcacagtgagctacttctatacacaaaagtccagtcattccctttgtctgaggtggaaaactgtgctgtggaggtaagggaaggacatccatctcaagcttgtttgattggcaagtttgttctagaaagaacagtttcagtgatgcagctagactcagggaagtttgtcattctctcttgcttcacaggggccactagaacacacttaagatccaggaaatagaacaaaagagtccccctgcttgtatttctggctcctttagagcttgtaccatgttaaagtagcattaatcatcttaggctaatgataatgttgctggcaacttactatcaatggaggagatgtttgggcaggaacttgaagagggactgtcactgagggtttgcagagcaagtgtagaaagaaatgggtaaataaatgcacacagatgtaagatcagtaattacacactcatctctctgagtccaagaccacccttagctaccagagagtgaatcagagctcacgcctttaatcccaggatttgagaggtataaaaggtagaggcactcattctctagagattgaggatagggcagcattctgagaattagtctccatccatgttgaggaaagcatagcagtctgaggatcacccctttggtttgagctgaggtagaggtaagagctagttgctgtctactttgcttttctgatcttcagcttgaagcttgtaccccaatatcaaactctgagtctttattttttgtgttacaagctcctactctgggaagatctagtatttacctgctcatgcttgcatgttctaacatatgacatttgtttcccagttgggttcatctgggaataaaccaaagtaaaaacttttaaacatcatcccagtcatcatcttgttgatcctcaaacctggaccatcactttgtggttgagcctgctttattgactaaagcctgacactgaatatcaaagatgaggaatctcttgagaaagaggaaataccaaaaagccagatgtataaacaggggcctgattttaattgatttattcttgttggaggcaataatacatgagcattgtactgaaagtcctgtgaatgggactgatgctttaatcatcactcctaacttggcctcttcacttcaatattcccatctaaattaccaggagaagaaatatgattggtccaccatagttatgtgtctaaggtcccacttactcctcttaatgaaggaaaagtgttttcttcggggatagagaagggaagctgtgtgtctatatgtcctttagttggaacttttggaagaagagtttgatctccttgtgttggaggctcatggtctctggagtgtgatgtcctgggatagcacagagagacaatgatcaactgaaacctgtctgctgctgcacctgactctcaagctcacaatgtttatacaacttctatggggcaccacacaattcaaatactgcagccctggattttggacaagaatctgtatttagacacgcagatggaagctagcctcctggatatgggcataagaagctggttcaattctagacctgttcctgagtggcatctatctatgcagccagaagacagagaatgctggggtctcagcataagtgatggttgggttggtctctcagcactctagctttgggggctgtgttcttctggcatgatgttttcctttaccctagtcaactcattctgaagcagctctccagcccccaacccacctctctaggcagagtaactgtattccaaatcatgggtctctatcaaataagccttcttattgtctgtgatgtcaaggactccctcttgtgcaacccattcacagcctgtttctagaaaagattgtgagatactcatttacacaaagaataaggagtaactaatgtctgtaaaaacatgttctaagagttggaataatcacgtccacttcatctctgtgcaactcaccatcttcctctctactccaggagagtgagttctctgatctgtatcaatgggctcctttgccactggtttctacttgactttcactgatggcaggcactggcagtactaagaggaggacatgccccccatccctactgcatgaccctttcttcaatgatagctgcagctctctttacaattcctctccttttctgcagatgtaaaactgataaaaaaaagacaaggccccctgccttgtcctgcctcattatgcttctgcatgtcttgctggtgtcccttaaccctgagcacatcttggtaaatagttcctaaatgagctctttcaattgcatttgaatgcaatatccatttggtaagcaccctcccttgacagcttagtgttactgatcctactttatagatgagaaggtacggcccaacagctcgatgaaattcagtgttaacccagatacccatttacagaactcagactttatgaacctaggctattcactgtcttggtgttgaacatcagcctcagctttgtccccagcttctcaggcattaagtcatatgtaaggatgtggtattgaaagagcagcctcttctgatcccacaaagtaaagttccaactttgtcctcccaaacacaatctgggtcttcattattgcttcttgaagaacattttcttctattgttaaaaagaattgccccgaatcccttcttcattcaggaatagctcctgagatttcaatatctgagatcctattaggcagagctcttaaatgtaattataggaaaacaactttaataaaatctaactcaaggcaagtcctgaaataccagatagtagaggaatctaattagctatttcactctctcccccataccacaaagcacgctggagtgtgaatagcctcatagattatccaggctcttaacctcattttgggtaacacagaccctcttaaaatgtaagtctttggatcttttccaaagacaatttcagaattgtctccttctttcttttttaggcacacacacagacacacaggcacacagacacagacacacagacacacagacacacacacacacacacacacacacacacacacacacacacacaatctataactattaactatttgttttctatcactgtctttctaggcccctaagttaatgttcctcatttccattctaagctagtgtcttaggtttgcttgcaaaacaaatgacttacctagagtcacacaacttatttattggcagattgatctgatttggctaaatttttttctgtcgtaatgaggtttctctttccatgcatgtggtctccactgtgggttagtttagggctctactctatgccattttatccagtaatgtagggtctgacaccacctataaccatgaaaggagagctggaaaacccagtgctggttttttaaaggtgactcctcaatgatggtcatactccattggctagagcaaatcatatggccatgcctaactcccaagctggaggagaagccatggcagagtataagacatgatatcaggggttggaggaagagggatttaagcttttatcccatgtgtttcactattccctggataccataccaaactaattcatctggatatagctcccaaaattttttgattacgatgcctaaatttcccctacaaaattgagcacaataattgtcatatagtgccagaaagtgatgctcagtcttctgggggagaaaatttatcaacaaattcaatcagttgtgaaccctacaagctataatcccaacccgccaggtaggatgggcccactgatgcaatagtggcatgactgctacggggacaaccaatcattttctgattggatttcaagtcctcttcacaggaagcgttggtgcctggtgctataaccgtggttaaaagctcatggctggggagttcatcaaccctgaaagggaaacccactactgttactttaccactgtggatatagtatcaaactttcttctcaatacttagcttatacccacagattgactctgttttgagcctttatcagagaagctttcatttgcagtgggcagtggttaatgcagtgactcataactcatcaaagtgctaagtgacagctaagtgcttagctctaaacagagagctatatcatccctcaggctcagagaacatcatagaagaggcagcagaaagaatgtaagagccagagcatgggaagaagtattgtgaaacactgtcttctggacatgacatgattattgcacacacgaattcatatctgtgtggttacctccataagatctgcacaagatcaggcctacctacccatattccattctggatgggggaggggatataggagataagagggtagtggttgtggggcatatgatcaaagtactttgtacatgtgcatggcattttgaaagaataaatattaattggaaaaacataaagcaacaataaaaattgagcctagcttgaggctttagtttatcttccttgcaatgctgcttttctggcacatttctttccatgtataccataacaaagaaggcctgtttcataaaaaaaaaaaaaaaaaaaaaaacactgatttttattgttgcctatgatctgaactgcccttatgtttctagtactcatttatcgttcctattcctctgtagttttgaacctaaggtgttagcaaagcaggtactagggtgtctctgggcttttcttatgattggtcataatgacagctcttgtttttctctctggttgttcattcattccacaatttactgaatagctattttgttctgagggttctaataaggactaaattaggatgtgtgtgtgtgtgtgtgtacgtgtttatttttaagtattgaaattaaaaacacaggttgggtcagcatcttgattccactacttactataatatcataagctctggggctattttaatatccatgtacatcacttttctcatctgttaggtagggaatatggatactataaaacttttttttccattattaaaactgaaacaatatatgcaaaaacatctaccataatacacggcttatggaaagtgtttaatatagttacaattctttttgtttccagaatgcttattggagaacagcagtgttgtttgcctactagacagtgtggcgaagaggaactagcccaggctttgtaatccagtagacttgtgttgaaatctcagcccagtcatggtgagaatttgcaccagtcactgctctggagagctttagtttcccagcatccttgtcttgcagggtccttggggatgcccctgtagggatacaatacggcaatgtctcatgcatcgaggtgtgctggagacaaggaatgaacaatggttcctctggacactgtgaggcatatgaaggcgaacaaaggaagtcgtcctctccctagccttcctagagatctcattgtggagatcagacatgctcacatacaatgactgataacgctatttggtgactgccatgaaagagttgtagcactctttccacaggtgtggaaatttgcatgaagtaagtagtttaagctgggaaaaaaaggggaggggtgtttttttactaaaaagagattgtaatttacaagccaatttctgtcagctctttcttccatcagttccttcttcgctcccaaacccgaggataccctatcaggaaaagcttatgtagaaagcagagatctaccaccctccctccctccctccctccctccctcaagagtttgctgatgtgcgctctgtttctgctcctggtattcacagcagctgagttatgattcagctttgcagccttatttttcatttgctacctgagattcaatgccctggcatccacctggaaccactgccataaagactgacttaacattcagaatcgatgagcaaacccgagaaacattttacctgaggcaggcgcaagtgatgagggtctgagctctgattcttagcaggagtttaatccactctgctgagctttctgtggccctcctccacctcattaccacataagatgcctcagaggtatggggacctgggcttcctttccaggatatgttagagcccaggatctctgggtgtcgttattatttccctttaattgtggcctctggacttaactcgttgtgggagctcatttgttttcttttccatttcctttccatgggtctcttctgggacttgccctatgaaacaaaagacttgtctaaaagatctcacagctagcaggtcttttctttgcctcattatctgtagattcgagctgctgattaatgtatacttgtactcttgagtttcccataaatcctgcttcttaactccgtgagattgatcagcacaggtgcagtggttgggagctcccccatcccgtttgttttcaactctctggagtgccttgctgtttactgtgggtccaggcagacaccttcttaccctttccttttccagttcttctactgagtggtagaagcctttggtggttctgactgcttcagttgctgcccctcccaccccttatcaaaatcactgtgaagtgagcagccattttatagatcttcatacgcattcctgactgcctttcatgggtgcattgcaatgtaacagccaagtccatgtggatctcttcgctgagatttggaatttgggactaaaagatttaggctagaccactcaggggtactggagctagataggacgttggggagactggatgatagttttcttctgtgtgataacagtgtgcagtgagagaaaaagggaacagcagcatacagaaaggagacagagaggggaaaagggggtgggtgtcttaaaggtacccagaacctttcttcctctgggggtgaactcttcactgagtaccagaggtgccctcaaaccttttccaataaagtgttttggctcagaatagtgcaagttgatttctgtttcagataatcaaaagctgctacttagtacagtatttttactgttgttgtttgtttcgttttgtttttaagtgagttgccagtttgtggttttgaatagcttataaggagaaaagttaggttattagttgtcacccttctaacagtataggaaaatgctaaaattttttttaatgtactcaagttaccaattaaattcaaaagaattgaaaatatggtcttgacacccatgttcgtacactgttataaccaaaagagagaagtaatccaagcgcccactgaaagctcaaagtgtggggtgaatatttgatgaaatactacacagctttaaaatggaatatcccaacagaggagagcaagaaagagcccagagcatgagaagctttcccagtacaagtctacataatgagttctgggccagccagagattcaaaaccaaaaccaaaaccaaacaagccaaaaacaaaagatgggaaaaaaaaaaaaaaaaaaaaggactttctcaggaggaattcaactaaacttttatttgctgatggctacaccacatgggtgatctaatgtggccctcaccccagacactggaaggtcatggaggtctactgaacacagagaaaatattcatattgccaggataatccgaagacagcacagctatcaatgaacactgaggacattatgctaagtaaaataagccagtcacaaagatacaaacactatggggatgtctttatgtgaggtatctggggcaaacacatctaatgcacgctgagagcgtgatggtggttagtgggcaaaggatgctgtgagagagggtcattatccaatgagtatgcagctttagtgtggacatggggcgggtcattgtccaatgagtccaatgagtacacagctttagtgtggacacggggcaggtcattgtccaaagagtatgcagctttagtgtggacacagggcgggtcattgtccaatgagtatgcagctttagtgtggacacggggcgggtcattgtccaatgagtatgcagctttagtgtggacacggggcgggtcattgtccaatgagtacacagctttagtgtggacacgggaaaggggttctcaagatcagctgtacaacagagcagatgtactccacactactgaactgcatgtttacgaatcattctgatggctaagttcattctgcatattttaccataattttaaaaccatcagcaaatgccatgaataacggtctgatgtatgggatatagtaaaaacaaacaaacaaacaaacaaacaaacaaacaaaagaccacctttattatgagggaatgagggaaaggcctaaatcatatttgtggcttggaactcttgtttttgttcagtttctgaacatatgcctcccaggatggccttaaattcatgacattcccacctgagcttcccaagtagatagaggggtttgcttttgtgttgtttattggttgcttggtggctacatggaggatcaaacctagagcaatgatcaagtgctctaccactgaattactccccaaaacctgactttgaattcaagggagtatgacttgtccctgatcctttaacttcttttagcattacttcactcctgagttgcttgcattaactcacacaactacctgctgagagtttcatgtcccatgcaagcatctgggatcaccaaggggaataagagacgggttgttgataagcctgatcacagcatccattgttgtggaatattattttaactgggcaaagctgtgttccatttgtttagactgggcaaacaaaccttctctggctttttattccagctgttgtgctcaccagttgagcttggcttacttgggagacattatcctgtgtgacactagtaggccgaacaaaagactcctttggtgtgttgttttcttgtttgtctctaggtaggacagtaactggtaacttgaaagtagcaataggtgtggctgggtagcactgatggcagaggcagcagaaagttggtggcagctgagaggcaaagccacaagactgtcgagtgacggtagctgctcgtcctctatggtgacaactcttacaccagccttggcaagagtccattgagcagttcaagtgacagccaaagcacaaattagggggtagtgaagaagagataggatggagagctgaaatcaaagatagatcaggagccataaagagctagataagagaaactgaagttcctggtcactggaagagacttgtcaaatctgtggggccaagaggctcagatctctcaggcctaggagctctaacaccggtctctggcataggctcggcagaggctgtaacacttgtaaagctaaggtctgctacataatacctgcaggagctgttacagtggagagcttcagtggggctgctcacacctgcctgttgctactgtttgctgctgccaaatgccaagggatatgaaagatgctgtctatatctatatcgttgatatctgtttttataccatccaaatctatatcatccataccatctacatctctgccatctgtgtctataccatctatatctatctttatctctttatatatacatatatatatgtatatatatgcatgtataagtgtgtatatatatatatatagatagatagatagagagagagagagagagagagagagagagagagagagagagagatggggggcttattagattggcatatacaggctgaggtccagtagctgaacgatggctttctgcaacagaaaggccaagaatccagagctgttcagtccatgaaactgaatatctcagtagcctcaatcttttgctaaagtactgggtgattccagaggaactgttgatatagagtataacttggaatcacaaagttctaatccaatcaaaggaatacttcagcaacaggatacataaactagtgagagtaaggtcaagcaggcagaaagcaaaggcttccttcctccctgtccttttatgggggctgccaccagaaggtgtggcccagtttagggtcgttcttctcatttcaaattaccagatcaagaaaatccctcataggcatacccagcagtctgggttttaattgactacagatgtagtcaaattgacaaccatgataagccatctcagctaccaaagatcagaacaggaactggtttttacctactgatgatttctagctgggagaacaaagggacccagttactgattggcaacattgaggtggaggggtgtgtgtgtgtgggggggggcgtgctaaatgtccaaaagaatggaagagtattccatgggagtcagaaggccagaggcagaaccctagcctatcatgtgcaaggctctgagttaaatcctcagcactgaaaaacaaagaaaaacaaaagaaaacataagaatgaagaaagcatcatgggagtcagaagaacttggggaagggtagtgagactgaaagggatttgattgaacagagggcacttggcctgagaagacaggattagaagaagcagactaaacagctaggatattgatgcgcttgtaattttaatcatgtaattatatagtcacatagtgtgagcacaaatctattcttgactaacttgcagcaatgtccacctactgtgcatccaaacaatagctattgacccattcaggaagataggtgttctacatgttaggaagacagcaatcaagtctctgcattcatcaaactcaaattctagaggctgctttttgtaattgtcaagaacacaaagaaatggctcagtggtttagaacactaggtcttccagaagtactgagttcaattgccagcaaccaataatgagatctggtgcctcttcttcttgtctgtatggatacatgcaggcagaacactggacacataataaataaatcttttaaaaaatatgtgagataggatcctatctttaatgtgtgaatatgtagtcctacacattattaaaatgagacttgtgtacatagttataaacgaagggaaagtgagagaattccccagtaattttgagaaagtaggtatagtagtatcagcagtgattggatggcagcagtgggtaagctttactttgtcatctgtattttctgtaccatggggggctgtaaacttgagctttattgtaccatttaaaagttgtgtataatgtacacagccaagctactgcacactaaaagtaaaaaaaaaaaaaatgctctcacctgttttctctcttcccatctcctaaaatagttttcacgtttctaactcaaagcctcttgatgttccacactccccacacagctgctatcacccccttgtttgtggtccataaatcctttatttgatcaaataatgtcttcagcttgagagtagtgcttttcctaaataacactgtaccagaaatctgaggcttggggctttgataaggcacaatatgttgcaactgcaaatgctcactgtttctgtttgctatgtaggctgttctgagtatagaaaatgttcaaataaagcgggctagaaagtagctcattgatttttatagtggaaacaaaagaaccacagaatttagaatcccttcctgtgactaccttcattacaagaatggtccagccttaagtgttgtatctttcccaggccccaaagtgctactggccatgatttcctagtatgttctaggcctaggaggttcaaggctaagtttgtttgccatggcatcgcttctgtcaaacacagatgtatcttttccaccaaggccccagtttgctggcaggacctgccttacctggcatggcttgtcagcagtggttggctttccaaagttgtgcctgctgtcaaaagccagggtgtggtgattttaacagccagggttttgaatgtgattttgtcaatgactttcacttatttgcctttctgtttcctagtctaaccattgctgtgcttcctctaaatttgaattgggaacgttttaatgggaatttttcagtgcatgcattttattgacaactcccctgctttttgtgccccagtgggtaacttgtaattgtggatcctgctgtcattttgagttaaaactcaaacaatttgcttgtgacatgttttaaaaggtggaagtaactataacttgaaaaatgatttacataaattgtggacaaatgagagtaagaaatttaaatataaaaatgagagtacatagttaacattatggcaatagggagaatcccaaggtttaaataaaaacagattcctcatcaaacatccacttatgtgattgctttgttggtggcttagaattccttgaagttttctgttgctcttaggactgagttcaagtgcatagggtcagcctatagtcattccatcccttgcctcctcttccattctaattgcaggataacctgtcctcttcatttcctcccgtgcctgaagggaggcaagaatttggaattcttgcctattcccctccatctgtatagctttcacttgtttgtcaggacccagctcctaagcagttttctctgaggagccttccaaaatttcagtctaggccaagatcctctgtgttatgtcatcataagcatctcatgttgtgtgcagatttcctccattagccagtcaaaggaggagagactgtgtctgttaccattgcagcctagtaactgagagttacttagcttgtacacaataaatatttctctcttttgggtgatttttttaattgtgagtgtgtggatgtgtatgtgtgagtgtgtgtgtgtgtgtgtgtgtgtgtgtgtgtgtgtgtgtgtgtgtgttagtgtgtgttcacaggaagtcaggaaagggtgtaggattttttagagctggagttagaggtggttgtgaacatccaatgtggatgccttgaacccaagttgggtcctctgcaaaagcaacattcactcttaacctggagtcatctctttagcactaaatacatatttcttaactaaatgggtacatgggaacatttgccaagaaaaaggaatcacaattaactttaagggtccatgctgtcagtaggttgagtacttaggttatccaatcaatgcagatgggcaaatgttgaacaccagaatgtgcccataccatcattgctcttgatgttctcttacactgtttcataactggtggcactagggctcagtgagcatggacaaaacatacagaactctgagctacagcggcctcacttattgctctccattctatagcaaggtgcaactgcttctaatttgatgctgttttcacaaccatcttctagactctcctgttggagcaggtgagcccttggattgcctctataagaaggaagtcaaaggcagacactggagtgcattcctagaaaggagagaagagagtagggagaaaactctgatctaggaatccagacatctgggtttgtctcccttttgttactacctggctattttcacactggacaagtcacctagactcccaggaccttagctttctccgcaactcactgaatgaaaatgactggataatttcttagcacggcttcagctttaaattctacaatgttaatcttaattggtatgtggctttgggatggtgtagtgattattgttcttcggcccagaaggaccacatgagatagctcatctctcaggggctcacctgaagttgcatattggatgaagacaacaaacataatttcataccacccacttattgacatttgtgtgcatgcacaggtaactaaattagaaccatgagctgggaaggattaaataagaatggcacatagggaacatgccacctctccacgacatgtctgctgttaccctttcgatgagccccaagggaatatcccctctcctgcacacccttctagagtcgcacggcccactctttctaatggatacttactttcagaaaaatgtttgtagttctgcctctcttgaaatttcttcatatatttaagcaattagcaatcagctctagcatcttattgctgcacgtgcaaatctgaaacataaaaatgcaaattgtggggaatgaaaatagatttgagattgtttgcacatcaccgatcttcatgaacaattaaaacttagcagatttgtaatgatctttgaaggtactaaagtaaataaaataattatattacctatgtgagaatttagtgaaaggagaggaaaattatcattctgagttttttaaaaaatagccaagttcagcttggatgatgtgactaaagaaacactaccaggtaaaagtttaaatatgcatagctttcaaacttgggctttctaacagatcttatattagtgacttcttcaacatgccctgaaacaccctaaattgtgaaggaaaaaacagaaaagaatttaaagtgaacaagcagtttgaacttgagagtttgtttggagctaaaatggcaggcattgccaaatgatagaaaatgacatagaaatgagaatatttatttttaccctgtttactttctgtgtgtgaacttgaaactgcatcactagttaagaaattcatttttttctgtcaccatctgcctctgctgatttaagtaagtcactttaagccctccagagagaatcgttgatatgcatggcattattattttatagaagggagactaaaaactttagggaaaacgggagaatatgccgtcaaggatgacactgtaatttacagtcttattgcaaattaaatagattctggaagtgggtatccacattttataggaaaacaaatgatttggtttctttctgtattggatcagcttcctgtattgaaatgggatatctgttctggaaagggcttgatcactgaccctgaatggtaggtataagttccagaccatgggtgggaaaattcctgaggatggtggtcagtgaagtgtagaaagaacctttctttctaagtgctgagtcaaagctgccaacgtagtgggtcacctcctggaaattttctccccctcttcccagaatgatgtacaacagttacattttagaattctaagtacctttccccagagaatttaatttcccgggaacaattgtaatttctttatcataaaaccttgtgtttgatttgtctccataacaatataaaagtatgtgccacctgttgactagagaatttacatcagctgtgaaactcagattattgcaaggaatgtgggagtttccatgttaattagagagaggaatctgacttgggtttaaaagcatccctaccacagtttaggaagtagggttaggccttgtttggagactgagcactgttctggcctgaatgaccttgctccccaccaatgagtaggttgagcccctagtccccaaagtgacaatcctagaagagatagggctcttggagaattgataagtcacagaggtgtcatccttaagaaggacaaaagccaataccaaactgttttcattactgtagctctatagtagagcttgaagtcagggatagtgatgcctctggaagttcctttattgtacaggattgttttggctatccagaattttttttccacataaagttgaatatttttctttcaagttctgtgaagaattgtgctgggattttgatgggggttgcattgaatctgtagattgcttttggtagatggccatttttactatgttgatcctacctatccaagagcatgggagatctttccttcatccagtaactgaaggaaacagaagcaaggattcacagctaagcactgagccaaactcctggaatctagttgtagagagggaagagtgatgagcaaaggggtcaagaccatgctgggaaacccactgaccatggtcagaaacagctgatcataacaagtgggagctcatggaccatagtctgacagctggggaatcagtgtaagaccaaaccaggccccctgaacttgggtgtcagttgggaggcttggacagtctacagggcctctggcagcagaatcagtatttatccctaatgcatgaatgggctttgggagcccattacctatagagagatactctctctctgcctagatacatgggggagggcctaggtcctgccacaaataatgtgacagactttaatgatcccccatgggaggcttcaccctgcctgaggagtggatgggggtggggaggttggtgaggggaatggaaggatgggagggggaggaaactgggattggtatgtaaaataagattttctaatttaaataaaaaatagttttaaaagggacatagcacataaggaagccacatagcacacttgtccccctgtccactaaatctgcaggtgcccagactctgagcttgctgtcccccagaaccaaggaagagattttttgtttttggtatattagaagcttgcccagcctgtggtctttttttatagcaaccaaaattggctaatgcaagctaagaatagataatcaaaggtgaattttctggaactccaggccgagctagagggagcaactgaaacctagggaggagagagagagaaataatccataaggtgaagggtttgttaaatgcaggaggggctggcactgggggctgattgacaaggcagaaggaggagtgtgtaccggaagttgtgcatagtatgaaggtcacaaggaaggctactgtggtgggaaatgtgagggcagagtgggaggggccaacaaaagtcagggtgctggctattagtgggtacactcgattggataccagaaggacattcctgaaatgctgtgtgaaaactgacttgccccaaactacaagcatgtttagtggtatgtcaaagaaagggatgtctctcggggaaagggcactcgggtaactcaaattctagttctctgaattagttcttttgctactccagatttatgtttctgtagattttctgagggccatggacaactgaataaaactgttggaagaaaaccatttaattgttttagtttggggtgtagcagcagtgaagtacagactgctcccaactgaaggaggccctggcctttacatccaactcctcgtcttccaaatgggaaaaacagagaaagtgttcaagagtaagtggctcctgactgttaactgaaggcctctgctctgctcaccccagaactgactgggcatcaagaggtgggaccctgcagtcctcccttccactcaaagctctctctgcatgggcttcacactggctggtgtgtggtgtgcggagacacaagtacaccacacagctccaaaggcctgtaatggtgcattggccctgcaactcctgcttcctgagacttgcctaaaagaattcactgtaagactccgagacagagggggaaaaaaagtaactgttattggctcaccaatagccagggactgcagtcatatatcttacagaaggagacagataatgctaagagaaaaaaatccatcttccagaaagcaataaagctttaaaagtgagtgtaggaaaaaacaccacagtccagtttctctgccgttcttacagaatttgtcaagaatgacaccttaaactgatccaagtttcatagaccctgggaaaccacaagtatgatgtgtttgaagatgctgcattctctaacaacgtgtcactttgctctggctttctcttctctgcacaccatctaactttgctacttgtcatttctcttcagtgatcccacatgtatctcttgtgtgctagaaatgagcgatataactgcagaaaatgcatcagggggagaacagagaagaaggcagaggcaggtggatctatgtgagttcgaggccagcctgatctacagagtgagtgataggacaggaaaaaaaaaactggttttatttttttacaagataaattttctttcttttttaattgaaaatatatttttcatactcttaattctgactacagtttcccctccccctacttctcccagtcgccacttttaccccctcatctggacccacactctttctgtctctctttagaaaacaaacaggcatctaagggataataataaaattaaataagataaaacaaaaacaaacaaattggaataggaagaacaaacagaagaggcaaagaaaaagcacatgaaacagagatagatagatagatagatagatagatagatagataggcacacattcacacacacaagaatcccacaaaaacacaaaactgaaaagcatatagttacatagcaaggagagaaagaaagaagggaagagaggaaggaagggagggaggaagagagaaagaaaatatgaaagaaaaaaggaagagagaaatagagaaagaaagaaagaaagaaagaaagaaagaaagaaagaaagaaagaaagaaagaaaaagaaagaaagataccctgactcaacattatgagacaaagaccctacaaagattcctttgaatttgttttctgttggccatcttctcctgggcatttggcctaccttgaagagttgtttgtttccccagtgagattcccttgaagaaaactgatttttgatttgtaaatggttatcaattggagattgcttcagggttaggtactagaacttctttcagttctagtacctcatctggtgcagaactatgcaggccctgggcaagctgcctcagtctctgcaagttcatatgtgtgttggtcctcgtgatttaaaggtccttgtttccttggtgttgtgggaaattactaatacggagtcaggtagaaatataagggtatttaatagggaatagccttacttacagagtgacccagccagctggcgtggtagaggtctgtacagcaagaagcaaagagaaaccaaaaccgaaaacgcagtcccactacgtcactctgaccacgccctcacaagcctggtcaggcacacctgtagccagcctctaagaaggcatggctacagctttccctacaccttggtgttatccatctctcccctcatccataggctaccctatgagagggaatctgtctgtctgtccgccatccatccattggtccatccgtccgtccatccatccttccatccatccatttgtgcctgtgtgccaaaatataaggatggaggtcagaacacaatgagtaggttatctccaacctgtgggttccaagaatcaaactcaggttgtcaggcttggcaataggcatccttaccttgcttttcagcccactctttcctatttttccttcttttctgctttaaataggttctcacaaactatctcaaactgggctcaaatgtagcaaccctcctgcctcagcctccagagtgctaagattattggagaacattacaacatctagttttgttttctttaaaaaaatgttaagactctaatttgtttttgaataatgaacttaatccttctaaggcttagagatatgtttggagagatttgaggttccagtggatgacctggaagtacatcaacagctctagactgtgagagctacagaaattgttcagtttacccccaagtcattctttgcttgacctaaagaaatttcaccttgttataacagtacaagaccttgctctgcttgctatgcaatggaaggaaattatttgaaaggcaatgttctggttggaagatggtgaaccacagagctgatctgtggtgatattgatttaggagtggattctataggagatgattgattgcactctagtgagtgctgtctggaaggtaaagacttgtgttcaaatgatgtgcatttgatctcaaccacttagtcacaagatgtggtttcatgttcttcaaatattgaggaggagggtcattatttcctcagtctattcttgtccttgtttactttgaccatgtgcagtttctgatgtatcattttacaatgaacaggctagggtgggtggatgtccagaggccctgttgctgcccaacaaactcatgataaggaagcaaacagaccacacctggagattgtgaaagacaaaggtctcctgaaattcagccaggagctaggcagaagatgagctcttaacacatttcctaccgcacatgacctttctcatgttttaagagccatctgttaaggaccactcatgagttttcttgtgttttgaacaccaagatacacttaaagaattgttcaacatccccacccattaaggaaatacaaatcaaaatgactgagataccatcttacatctatcagaacagctaagaacaaaaacactaatgacagcttaatgttggaggggatgtagagtaaggggaacactcctgcacttctggtgggagtgcaagcttgtacagccattttggaaattgatatggcagtttctcagaaaattggaatcaatctacctcaagacccagctataccagtcttgggcatacacccaaaggatgttcaatcataccacaaggacacttgctcaactatgttcataccagtgttgttcataatagccagaacatggaaacaacctagatgtctttaaaccaatgagtggataaagaaaatgtggtacatttacacaatgcagtattactcagttttttttttttaaataacatcatgaaatttgcagacaaatggatggaactagataaaaatcattctgaatgatgtaacctagaaccagaaagacaaacatggtagtacgtacttactcataagtggatattgggtataaagtaaaggataaccatgctataatccacagcccctgagaggctaggtaaaaaaagaaggcccaaagagggacacatggatttctctgtgaaggaaaaatagaagagctctcctgggtaaactggggactgggggttggggtaggatagagggagaaagagagtaatgaaagatgtcttgatggcagaagagggagcatttcagggttagggagaaacttggtaccagggaaactcccaagaatccacaaggatagcaccatctatatctgcaatgtggagatatacatgctgaaaggaagaaattgcaagaaactgttctttagtccttggaccctgtcttgacctaaggtaccatatttaccaggataattacaatgctacttctactgctgaattgttgctacaaaacacaactaatgtctgtggggctattagggagagtagaggtttaccaccaaatttgaaaatgaaaacatcaagaatgaagaaaggtgacatagtaattgccagaaaaggtgatattcttctcttagcatggaaagacaagtgggttgtccaaatgatgtcaacgatcgatgacacttctgtcttgacaacaggggaaaaatagaaaaatgggagagaatattgtaaaactacctgcatcaaggaatgcaatgcccacatgaaaggtgttgtggatcaatttcttttctgttgttccattcaaaggaaaatgatggcatgaacaaaaaaggtagtgctgtaccttatgaactgtggagttttcaattcatttagagtgtacaacatcctcaatccacaagcaaaaaatggagtgtaaacagtttctgcttttggtaacaaaagactaacaacaaatgacaataattaaggctctctggaaccatagacaagtctgtccagtccttcccctgggaatgcaagtagagcactctaaagatccacccaaaatgttgtcaggtgatacaaaagcagcaagaacctacgtgtattccagtgagtggaaagaaaaactttgctaggagagcctacagagtttgtgccacccatggataaaggagtgaatctagatacttatgtaatttttggtccctcttcctagagaggaaaatgttttaatcagtgccatacattttaaatgtaccaggaactttaattgtttaattagtcatttcattgttcaactgtttttataagtaaaaaagttattgaaaaacaaattcaaaatgcattatgatatgcaattatgatgatttaaataacattcagtttgccccaaaacatgtgattcctggcatatgtcttagagatttctacacagtatgaaatgtgttatcactcggcttcactatgaactccaggcttaggattagctgtgactcaaaatgaactttgaaccagtatctggagttctgtttcttacttatagattccagatacctttgtctccatgaattttcctccctgtctctttagctcaggaattctcctatagtcttctaaggagtttcttccctacagaacttcccactaatgaactccacagctagagtcaatgcagccctaacactcacctcccttgtctccttttcatccaatagcatcccactgaccagtgtttagaatgaggtactgagcatatctcccccgcagcagcccatgggccccctgtaagacagatcatagtctaggtctcagagaaagacttaataaatacgaaacaattgaaacaatttcttagctcttatcagatcacagttgaataaaactagaaatcaataataagagaaatcacaaaagctacacaaacacttggcgtctgaacagtatgctgctgaaagactggttgtacatcagtaaagaaactgggagggaattataaaattataaacgaaaatgaatgcatagcctaccaggacatatgagatacatctaaggcagctctaagaggaaagtttgtaactgtgagtgcttgtgttaaaatgttagtgatagatccaataaataacccactgtgcacctcaaagtctaggggaaaaatacacagaagataaaccccaaagcagttgatagtaagaaataacaaagatcagatcaaatcaccacagaaatcaatgaaataaaagcgaaaagaacaatgcatagatccatcaaagcattagttctttgaaaaactaaacaaggctttcaagcacctgcccaatataaccaaaaaaaagtaaagtttaatatgacaaggggagggtgtcacaacaggttgccacagaattcagagggtcactaaggaatactttggaaactcatactttaaaaacctggagaataaagacaaaatggaggcattccaagacacttaaaacttcctttacgattccacctggccccagtcagaatggctgggaaagcaaatactggccaaaagatgaagaaagaaatgtataaactgtcatcagggtgtcaactagtctatccagtctagaagtcagtttgggggtcctcccaaagctatagacagagataacctgtgacccagttacaccactcctagctttatactccaaggattctaagtcagcatcccacagagacacgtgtgtgtgtgtgtggggggggtaaaaatagaaaagggaccatagaaaaggaagaagagtaaagaaggagagacaggggaccgaaggggaggatggaacatgaacgcacaaggtgggactatggagggtcaggaagggaccagggagacaggagaggtgaatgggagaggtgtaacaagaacacagcatagtaatttgagtatggcaatgtgacagtgaaacacatgtcattgcacgctaaccaaaaacttaataaaataaaacgaaaataagccacgtagtcagaatattttgtcaagctaaaagtcatggtgagaatatatgtttattattataacagtccaatcacttgttgcagcaggcagcagaatttccaactttagatgttttacaattgtgcaatctttccccagttgtggttgagagcttattttagctatgagccacagccaccgataagtgctgagaagtgtgggcaggcgaggccctgtctgggtccctcactatagagcaacagagcatgcaaacacatgaatttattgggagcacatgggcaggggtgcctcttggctgagagctgaaactcaacactgactcagcaggacccagaaccaaaacacatgcttgtgacttccaccgtccagccccagtggatgtgtctctttatctcttgccttgtactcgtgagtcagaatgctgcaaaccatcttagtctgaatgctggaagattttgggtgatgattgcagacagatactactttgaagtgttgggagtatttgaacattagaagtagtgagaaaatacaagacaaattaattagcttgccaaattcttcctgtcaagggtctgggatataaaaaacttttactgatcattaatcatttatcaatagcatagaaaattactttatttttaatttagtttttatgtgtatgcattttgcctgcattcgtgtatgtatgtgtgatggggaatgtactgtgtatgtttatcttattgattgttaaataaagttctgtttggccaatgaaatagcaagttagacagtactaggagtcaaagaggattctgggaaatgtagatcagtgatccaggcaggaagtgacatagtaaggagactcatatctaagcgaggaaacaggaagtgtcccctttttcccgtttgcctcctccagcggaagaatgtgagccaccgacaaggagggacgccaataaggcatccgataagataagtcttataacatatatagatttatgataattaagactgagctagcaaatgagaatcctagtcattggccaagcagcattatacctaatatgtctctgtattatgttgtccatccacacggcgggcagaactcgggcggctggcagagactgcccacatggcagtggggctcgggcagcctttggtggaaagatttatcataacgtgtgtgtgtgtgtgtgtgtgtgtgtgtgtgtgtgtgtgtgtgtggtaaaaagaaggcattgaatcccctggaactgtagttaccagttgtgagtcaccatatgtgtgcttggaactgaactagggtcctctgcaagagcagcaagtgctcttaactgccaacccatctctccagccctaaatgtttattttcttgcttctcttgtttcaatttgttttccctaaggtacctataaaattactatagtgtttgcaatagtcagcatagcaactgaagaatgcttggggatattttaataattgtgtttgtgtgcatgcagaagtagccatagcatgaatataaagccatgttccctttacctcaccagtaagacagatgctgagtcttagagttataagtaggctagagttaaaagtatttgtctattttataagacaatgaacttatataaaggcaaattgttataattccagaatcatttcaacactttaatattttatattgataaattatatgtatacttacttaatttcaatatataattttaatatctctgaaaaataaaatttcagaaacatgaagaataatttagttttaaagtttaattttactagatatatccagatctgtatacactgaatgttgttttaatattttttaatcatttgtaactgatacagattgaaacaatgataaatatagaaaataagaaagtgtagtctgtgtgcatgtatgcatttgtgtatgtgtattgtgtatgtgtaccgtgaatgtgtatctgtgtgttttgtgtaaatctgtatgtgtgtgtacacatttgtgtttgtgtatctgtgtgtgcacgttttgagtacatgtatctgagtgtgtatatgtacatatttgtgtgtgtgtgtgtgtgtgtgttgctgggggctgagcccagggcctcctacatgctgagcaagttttgtacttcaaagctggatctccagccatcattttactggttttttttgagataaggtcacagtaagttgccctgcctacctttaaattcactgtgtagcaagttggccttgaatctttgatccacttgccttgacctcctgaataagtaaaatacagccctacgagcctagcagtatctctgatggggaaaacatgaatatcatgatgaagatgcaaatctgtcaagacaggaatatttgtcaaggagaattgccctgatttgtgactgaaactgaaacaatttcaaaggatcgacttggttttggctcacagtttcagaggcatcagtctatggtcagctcagccatttctagtgccatgctaaagcagagcatcatcccatggtagagctgctcacatcaggacagctaggaaggagagggagaagaaaggaaggagggaggaagagaaagacagaagacaaggtatgttttttttttttttcctagctgtgacccagtgtctggttatgcacctcctcaggccccagctcccaataatactaagatgatatatcatgttatgtacccactcaggtcggagtcctcaggagcaaatcacttgtcaatgattggatttaccagataaggaccaagctgctaacatcgcctttggagatatactttatatacaagccataactgtttctatgcaactgtctctattgtaactatgtgttctcatattgggcaaagtggggactatagaaggactgattgaggttgcttatttcctggcctgctaattattcttctgcaagagggcttccttttatgcaccaaccatcctgtggcaggggctgaaggcaagtaggcttgactttgagacgggactccagccaacaaaagacttagccccagcagggccactgagacagacatctatccctacatggatgccagagtctgtcatgaggtgggttgggttatgagtgtggtgggaggaaaaacaggtatgattcacctgtcctatttcctgcccaagggcctctgggctacacccacaacaagcttgtatgctgactccccagagctgcttgtagccactcttagcatatttcccacacaggctcagattgacccaagttcagagctagtggaaaacatcattgactcctgcttaacagggtaggagacaaaaagtaatcgggatatttttatctgccccatgtgattaagaatagtcttcatccgcagtgatgttttgtaaacagtttagtcataagcacctcactaggcatgtctgccagggcaaaatttatggtctgcctatgatcggttttgctgtgttacttcggctgaaccaagatttatgtggtgttgtcttcatgccaatcgccaaactaggcgctgggcaaaatttaggaaggagactctggctatgagtttttaatggactgctttcagctgtgtgaggaaattgtgtatgtgaagaacagctacagaaacaaatcagagaagcagacaaggagccggggtcattcatttagctagcggagagtgcctctctcttacctaagcaatcatcccagtgaacctcaagctgattactgtctgttccacaatgaaatgttgatgctgggtacaagtgatcgaaggaccctggactacaggaaggatgaactgtgctgcatgctgcgttcttgtaccctcccccagcctctaggccagtgattgcaccttggctgtccagcaccaacactaggacagctcttaacaatattgttgcccgaatccactggagcccagtaagtgacattgtcttggacactgaatgctggcacattctcattgttaaagcttcccagatgattgcaatgtgtagccaaggctggcatttgctaagctggctagcaagctattggttgcatggtaattgctcagcaaacattcagtaaactgaacttgggaacaattaattttttcgcaggtgccactccaaaagaaaaacaatgaggagcgagctaccccccttataattgttgagctgcagacagaaccatttgtctagcactgcagcccctctgctatgaaatggtatgtgtttggagcagagcagtggccagtattcatctctgctgggaagcagtgaggctgcagtgtggctaaggcttttttttccagctttgagtccagctttgaaatcactgctgttttaaagttgtactgcattattgccttttgcagaacaaatagccccagttcagattctcccatttgtctacgatagaagcagcttcctttggtacctgggggaaagtttggctgtttggccctggcaaaggaataagaaaggttgttctcggtagataaatgcactctaggtcactcagttcttgtactttacatttttgccaaaatatgggtctagagttaaggttaaaatataaatgagttagataagctgcattatcaaaataattacagtgagtaaaaaaacagatggatagataggtgaatgaccaagtaataacttagacccctgtagttgccccattggctctgtaatgccaaactgatgcaaggtgcagcctagtatacaagtgacagggtcaaagacgctaacaccaaggttccagggaaaaggcaagaaggccagacagtgaggggtagcattggagtcactgaaagagacccggaggggctgaattgtaaagtggtgatggcgaaatctaagtttcagtagagaccccaggattgaggaaagctacaggccctgagtggaactggtcccacagaaaggccacatgtgacacaaatgactgacatatggaagcaggttacacaaatgttgtagagccaatgacgccactatgtttgccagatgctggatgaggagttaaaggtttggtgttcgccttgctgagtttcagccttgctttggcacagtttttccttcctgtttttctcttccttcctttgggagtgagagtgtgtatgtcactatgaattggaagcttgtaacttaaaaaggatttcacaggggttcacagtgaaaaggctgaattaaaactttggtctcttgatcaatgttgggactgttaaaattttagggctcttaaattggaactgaatgtattttctttatgaggaacctgtgagactatgaaggccacaggtagaatgttatggttggagtgtaaagtatctcccatgggctcatgtgtctgaacatttggttcccagctaatgaccctgcttgagaaggttacgaaacctttaggacatggtacacaactgatagatgttgatatcagtagtgttccttggggattttagtgatgcccaaggactcttcttcctgatcagtgctatgtgagaagccaccactgcaagtttccaccatgcaaattcccaccactgcaggctcccaccactgcaagctctcaccatataaactccctccactgcaagctcctgccatgcaaattcccacaactgcaagttcctacaaatcaacccaatctagttgctatacggttccaggcatggttatctgaatcctctgaaactataaatcaaagtaaatactactcattaaagagatttgggagacctgggtgggtgggaataagaagacagggagagggagagtaactgactgtctttgttaagtgtgacattccccgttgctgttgagaatatcattccccaaatttctagtcaccatcaggatttccatagattgggttccaggtcattgggattaattaagatctgagtttacagtaggtagtcccacattatggatcacagagccagctcaggatgcctaaagccttaaatttttaagacaaaatagtcatggtgctaacatgtattccaagaatgtctcctagaccagaatagaaagatcccatggttcaggagtcaggaagccagtagaaagagctctccatcccctacctgtgctctgaaatgttcaaatcactgggtcaacaacagggaggtcccttagctacctatttgctcctctggtagtaactttggtttctttgtatgacataagctttctggtaaccacttagtttattatagcacctgccattctccacagccaatggagactgttttcagtgggtgggagactaaacatgtattgaataggttcgtgatggatataagaatggagtgttagcggatgacttgggaaagcagatgacacacttgagaattaactacagcaggagaagggcattgggaacataaaaatggaagagcattagaaaggacagcgaacactgtattaaaacaacataacagggctgtgaaggaaaagagagacttcccttcagagcttgagaaagaatttcattaaaaggggcagcttaaagaacgaaagagctgcaggatgggatggggaaaaagcaggggtcaggtaccaggatgggccatagttccaggctataaaaccacagcacagaacttcctaactctctgtcccaggaaggaagtgaagaggacatggcttgatttctccaagctgtgaaatacaacctcttagagtaaccagcattgaaaggggacaggcctataatatatccatttgaatttggtgtcttagtctgctttttcaattcatttttttttcagaatttcccattggacagtgtgccaattcttaaattgtgtatacttgggaaacccatcagctggtcttagcctagtaagaactaatctcattgaatttcttgcccttcttcatctgagaggagaggaggaaagaagccagagggcaaggaagatattagcaaaccatgtttatttcatggctgtgtttaaagctgttgccaccagattccactggaaaggaaacaggttcactgttagctacagataactcatgagcaagtttactagaaaattttactagtcccctggtggtggcacatgcctttaattccagtattcagccagcagaagcaggtggatctctgtgagtttgaaagccagcctggtctaccaagtgagttacaggacagccagagatacacacagagaaacccctgtcttgaaaaacaaaacaaaacaaaaattttagaacaagctgaaacctctattttgataaaggtttctttacctgaaaacatttacctcctccactcttctctccctctatggctcatcatactgcaaagttgctcactcacgattatagccaggcatcttcagctacatgtcttcatttccatggtgcatcatttcatgcaccatcaggccttcaggcaacatacccagtgcatgaccttgcttgtgggaaataggaagaagaagtgctctgagtcatacttttctaagctgtttctgactacaaaatggggaaaattcctttcccaagcttccaggcagagtctccacacatcttcagccagaggaaatgtgtgtcatcctagcagccaggagccctggggaaggcaagaccctgaaggccgtggagcaaagtcatgaaccacttggaactgagaagatacagggcaaaggattcttagccctaaatgaccctaaatcccagctccattcattccaggctgatgttcttggggaaagtctctcccctccccagcttcactcttggcctgtagaacagtctccaccagctgctccacatctcagttaaaggtgttagtttctgcattacgggcatagttccgcatcccgtaatttttctgaaactatggccctgtgagtgatttagacaccattatcatgtgcacttctgtgatgataaaaccacagaggctagctatggtctgataccaactttgcttgctgagtcattgggaagtccaactattgtggtgtatgtggaagggcttggaaactagtgatttaaagatgacaacagaggaaattgacaacctcaggatttcagagtcagacaggactggctgcgtggctggtggtggagagcttggaaagatgcttccctgagcttcagttaacctcctttgggagcagacaagatcatggtatctccttcctggtgtggtaatacgaagaaggatcaattcttttcttgacactctcagcatagtagcagtatttcatctgcacgtatgtgggccattcctcatgacaggagcatgattttgaggcagggtaaaaagacagggaacattgaggcatgccaggaaaggaaaattgcccattgtttctgggcctagcttgcctgtccaactgatggtgtcaggaaactgataaagtcaacattatctactgaggaacccatgtttgtctagagacatctccaagagtgattctgaatgtggcaagtaaagtgttgtctgtgggctcccccctctcttggctaagtctaaacaatgcccttcataagtccactttacaaatttatttattaaagaagattctttaacttttttctttctttttttaattaattcttattttacatatcaatccaagttccttctccctcccatcctcccataaactacattttggggctggtgttaaaataaaagagaggcttcttagcaacctttacagatgtaacttgaaggccaccaaactcctatctgtatctgttgtaaagaagcctaactgtgactctccctggagaaacccatcccaccgttgggtgtgtctactattccttccctggtgtctttttctttttaacctgcttagatttacactaaaacatctctctctaactctgctgcataatggctaagcttgcaatgctaacctcctcctcttgacaccatgaatactggttttgactgagcagagaaaggcctctaaaaaggaaaagtactctttcagaatattgtgagggatgggttaaggctgcacctctctctgtgtcatggctgacaattttaaggtattgatcacaaagtagtttcttctcaggcatttccttccatgccctagtcactccttattcctgtttatgtgtaaaatgcagaacactgatcactactgttgaaaaacaaacaaacaaacatacaaacaaaaccactgtgtactgtgaataacaaatgctgaagcctctctctgccttgctggaatgaatgaagttctacttacgcaaacacggggcagagttctttctagctactcctactccctaccagcctcaaaccaaggttcccttgtttgggctatgctcttccaccctaccttccaccccccatctgccttgtgccttttgtgccttgactctgaagagacaagtctccccacagtcccctactgcgcacgcgcgcgcgcacacacacacacacacacacacacacacacacacacacacacaccactatgctcatcattgtgcccccagcactgccttgagtgtcgcttcctggttccacactctgagcagttgaagccacccatatggtaattggtggtggggagctctgctttgcccaggctttcattgtctccttttgccactccatttttagctcacttatgactcacacggggatgtacaccaagaaaaatatcagttggggctcagactgtgtctttcagagtcagccctccagatgtttccagcaatccaggagttttggtcgtataactgaattcctgtccacttaggtgaatccttaactagtcctcacaatgtggcctcattcagacacaaactggcttatactagttaagaaaaagattactacctgggtgtcatggcatatgcctataacctaggcactgaaaatagcaagtggaggctacaggataagggatcaggagttcaaagcgatccttaactacctggtgtgtttaaagccagtctgtgttatggggagatcatatctcaaaaacaaacaaaggaatgaacagacaagaaaaaaaaaaggaaagaaaataaaggtctcatgactcataacacactgactgtggaactttggaattgtctcggatgcaaatgcaccttccttccctccttccttccttccttccttccttccttccttccttccttccttccctccctccctccttccttcctcctttccttccttccttcctttcttcctttatttctttcttaatagcagccctatgaggctttgcaagctagtgtcaaacttctggcctctgacctcttctgacctcttgaagattcttctggcctcatgcaagcaaaatatatacacacatttttaaaagatataatttgtattcttcaatgcacattatgattatttgatttaaagatgatacaacatatgaacataccagaatgtcacatggcatcctataactatgtacacctgtatgatgaagcattgttctaattattctttatcaataaaaattcagaagtcagatattggggtaagagcttgaaagatcagagaagccaccagtcatccctacctgctctgtcccttcctccagacagtgagccagatccctttctgcccaccttactacttcctgtcctatctatcctcagtcttccaaaacctctgtgtagttaattttggtcagctagtggctaactctgccctctgactccaagcaagctttatttatcagaacacaatcaaaatatcacacaacagtttatcttatgtgtaaattaaacaataaaatctacagacaaaagtaaacaccatagtgaccagaaagtgataccataatacaaatgttgatgaatgcaatcaatagggacattagatgcttaggcaaactactttcacaaacaagaaacaaatgattaaaaagtaaatgtgcaggctataaaaataaagggtattaataaaccagaacactttctgtccaaaatgcagagttgtcattttttaaaattttttcctaaagaatgccttgtttggacaccactgggcaactggacttgttctgactgtgtgtgtgtgtgtgtgtgtgtgtgtgtgtgtgtgtgtccaaatcttcgctcttttcatggccacagtttgcctcccagagcctgcagctgcaggctgctgtctgtggttgggctggtcggtgagctggctctagctatgcttcagaatttccgttggccactaacggccaagctccttcagtgtgtcctcagctgctttggccccagacaggctctgtgctcagcaaaggcctctcggtgatttcttttttgctaacagttttaatagtgtgattttttccccttcaaaaactaattccatgatgtttggccgttggaaacatcagactggctctgtagagaagacatttccccaaagtaaatccagtccggtgaggagactataaacatgcactaccatgttgctcagccacacaagagttctaggagcataagcgttttctttaatcccaggaagatttgaatttattttaaatgcatggcatacaaactcaataaattatcagacaccggtaagaaaacaagaggaaaaagcagcacatttgctgaatgaaagtattgtcagagaacccttgagttttaaaaatctattgcttttggtgtgtgtgtgtgtgtgtgtgtgtgtgtgtgtgtgtgtgtgtgtgtgtgtgtatgcgtgggcatttctgtgtacagagaccacaggtcaatgcagggtcttcctctactgctttctaaactgttttttgagacagggtctttccctgaatatgtgctctgcccttggctacactgactgcccagtaagctcagagcatgacttgtctctcccctccaccccactgctagcactggattacaggcacattaaatactccctgacccccttttttattcttatgtggctgctggggatctgaacctggggccttgtgcttggatagcaagcattttacctactgagccatctccctagcactgccagtgatttaaaagaaaaaattctattagcatatgtcatttgtatgacatcattgtgacatttccatccaagaactgcaatcatatccactcgtcttttaacattttttgcctccctccatgcccctataagcacctctgccaacaaacatacatccttctagtcccatttattttttagaaaattgatactgtgtatgatagaaatcatgtggcgtttgtttctctggatctgctttgtttcacttaagataaggctcttcagctccatctctattcctgcaaatgccatgacttcattcttgtgtgcagctgaataataccctgctgtgtctatatgccaccttctctcttttaaaaatgtttattactcttagcagtggtagtattaatagtatatctgtggtttgtgggggggggtgtgagtgcatacacacccattcatgtgtgcaagcacacatacatgtacaccatgtgcatgccatagcctgcatgtggggatcaggggacaacttttgggagtctgttctcatcttccaccatcagagcatcagactcacacagcaagccacctcccaagccctaaggcacattttctattcccactcatccacagatggcgtcaggatgactctgtaacctagttatgtgactagtgcagcaatgaacaccagtacaattccacgttttctaggccccttcccactcattttcagagcaatagcatcataatagatacccaaactaacatcattttccccctcatgtcaggtgggaacccgtttcctccataaggagagccattatcataagtcacaaggaactagcttgacctgaactgatgggtgcctcaggaccttagggacatgctgtcagttgccctagacccgatgagaacagtgtggggctgttaatttgcttataaacagaataaaaccataatttcccttccctgttctcaagcatagtgtgagcagccccaccccaccgcccgctgtgccttaacaactgtagagaacaaagtggaaccaaagccatgctgaccacagaatggtgtgatattagatcatgtgggaaaatttttactctgcaaagggctgctgaggtgcctgcatcctgactccctgaggaattctggagcccacagtagaagtcctcacagatattagatgatactttacatcagtttgccttcctgtcaccaactaggacatggagtccctcacaaaggctgattacccctccatcaaaacatctgcagcagatgtagagcattgagggtgaaggtggtacgaagaccaaattctgagggccattgtgatttttctcatacattccttcaatggttctgagagttgaagttactttatcaccatgtcacagatgagaaaacaatgcctcaaggactaacttgcctcttcgatggaaatcagaggtggagagacttcaaatctattgtagagcagtggttctcagccttcctaatgctttgaccctttaacacagctcctcgtgttgtgctgaccccccaaccataaaatcatcttcattgctacttcatagctgtcattttgctactgttatgaatcttagtgtaaatatctgctatgcaggatatatgatgtgcaacccccgtgaaagggtcattcaacccccaaaggcatcacgacccacaggttgaaaactgctactctagcgattccactaggatgactgtttcaaagggctagctgaccttggggttgggagacactaaatattacagagttatattacagaaaaggtactgcatttgctgcaatgctttggtctgccttcattatagttcatcgtgcaggcctgaggcccctctgtgagttcagctggacaaagtagctgcggtgccccatgggagtaagcatgactgagcagatctttatttctcaagatcagatgtcatttgaagagtaagtaacacctcaagccaaagtatggatggcaccctattaatttattaggacccaccagataggaaatcggaagcaatcatctttgcttctaatttcttctaaatgtttattctttctcaaggcaaaagacattgtacaactttgtgctaatttactccaaactcagcagattctaaagtgacttgacatctttttatagtcctctggggaggtaatgaaaccattacactcatctaatgttggtctttgttgtaaagttttgtaaacaaggccctgctccaaaagagctatgttcttttgatattcttcacatatttcttttccaagggcgttccaaataggttggctactaatatttatgctaatgagatggcctggaaatagcaccattgtggttctaggcaatatagtcaatttcattgtatgtttgagccccacttttgctgaaatagtaaatctcataagagccttgggtggcaaatatatggggaagtgttttttttttaaatataattaacttatttgaatgtacccactagctatcttaacattgtaattctaacttagtcttgggctaccttaagtacacaagttaatttcaagctgttagaggggctttcgtgacctcagaggactaataaactaaaagaaaccacagcctctccagtttgaaaaaaacatgaccatgacagtatgattaaatcctccctctgtatctctgtaatttggttacaaataagcctgaatttgcaatgcctagaataactactcatactgtactaacaaatgatttcatggaatcaaattcttccttattatttctaaaggcacaatggtgttttgttgtttcttgaacaattcattttgagctattcaacacctattgagttcatagattttatttacattgcctttgggagtggacaagttgttttctaagacagggctatgcatatgttcaaagtagcaaatacaattagactaagtgcacgagaatgtttgttacctcttaccaaagtgctttggaagagaatagggccttgcagattgtctgtattctcaatttatccaactgtgccttcctagtagaatctaatttgcttgtctaccatctgcagttcctgaagctaactctgggaccaaaatgttaaatctcactaaaactgagtttatgtgttacccactgacagttacactgtgagactaacctcaatagaggactggccaccacacaaccaggcattctgagcagaaagagcgtgtgacatgagtgagctgatctgcaaccatgcaatgtgtcatgaaggttacagaatcctctagggactgctggcagcattgtacttgttttgagcatatggagagagacattctattactcttaggttcatgacagtcagactctcacttctttaaatccttcagatcaagggaaccctgggaaattctgtggtttcagttggtgcatccatcttatttccttctcttatgttagtgctataatagtttagacttcaagtactgtgtggaatagtcctgaacttagtggaactgctttgagattttctctgttttaacataatgttgactatagtttgttgtatatagccttttggattgagatatgatccttctcttcctaatctctttggagttttaccatgaagagatattgaattttgtccaagacctgttccatatctacttagatgatgcaatggtttctatgcttgagtccattcaagtaactttgccatctttaccgattttcatatgttgaaccgttcccacagttttggaacaaagctaactgaatcatagttaatggtccttttgatacagtcttgaatttaattttaatgtgctatagtaagactttttgtgtctatgttcattgaggatacagtctgtaactttcttggttatctgtctgatttttgatatcacggtaatactagctccataaaaaaagtttggtaatgtttcttcatttctactttgtggaatgatgctaaagggatcagcatcacatctctaaagctcttgtagaattctgcagcaaattcatctgcatatgatgttcttagttaaaagatttttttacaggccaggtgatggttcagtcccagcactcaggaggcagaggcaggaggatctctgtgagttctagaccagcctagtctacagaatgagttccaacaggctcaaaagctacacagagaaacccagtctcgaaaaacaaaaataaaaagttattattatttttcttgaaatttaattgtttgttgtagatctgggaactgaacctgaattcagtagagcagccagtgctctttaccatctctctagccccgcctaccctgttcttaactaattcctttcatgaaagacccctgaagaggtactttcgtagaaggagacccgcacccaggaatcagcgagaccacggacttggatgcaaaagcaagaggctttattggagatacgggtacccgggcgacttagcttctgtgaggccaagtgcgccgagccaagggaaaggggtccttatataggaaaaaggcgcaagctagaagcagggattctattggataattctaatgaggcattgtacagagctattcccattggtcaatgtaaatgaggcgctactcagggttattcaaatgaggtgaaatacagagtcattcaaatgaggcaaaacacagaatcatttctattggatggttcaaatgagacacagagccattccagatcagcatattctcaaggtctggtgtttggtacaacagactcaattccccccctccgcgtccagatggctgaccttgggggtggagaccttgggacggagtatttctcatcaggtgggggtgtgggggcggggccccgggcaggcctaactggtgctctcgccctcgggccaacgcacctggtgctcgcccttgggccggcccacctggtgctcgttgcccggccccagccccgaggcgcggtgccaggcggggcgggccgggggcgcgagccctgccagggtgaaggcttgggaggccccggcagctccgcagccccccccgtgtccttggccttggaggaggctccccgctcgcagctcctggacaagcagcaccatcgctgctctcccactcaatttccccttccaggcgccgcccgcactgcattctccagccctggccgaaccctggccctgctcagtccccaccgcgctgctctcagtcatctgctcctcccgcctgctccagagagaacacccagcaccggcacaggcagggaagacagaggggcagggtctttcacagacagtgttttgttttccttcatttcatttttagagtaactgttgaaagatatgtagaactgttgaaggagagtacttggtacttgaggtgagattttaggaaaaaatccagtcaggatatctcctttctgttacccactgttgtggagtttccttgtgcattcgttgctcagaatggatgctttgaatttgtcagcacattataatggacatttgctcttaaaattaggtggttttttttttctcccactacaatgtcaaattttgttttagctatttattcgttactgtaaaactaattcccttcaagggggtagcataatgaaggttcacacaactgcaaagaaggaaacccagtcagccccataattcttcctctctgaaaggagaatgagagatcattaatatgacccctacattctaaataaaatgtattctttagaatatattaatttgtccattttaggagaatggcttagtcacagtgttttaactacttaaaatgataaccactggtctgccagtttgttatctgcacttaaatgctgaactgaactacagttgttcattgtagtctctcctgtaatgaaattcattaatgatggcatatttagagcttacatggaaaaggtcaacttcttttgtatattgtcctcttttaattaagttgagggtccttgaaagcaatttaagcccgaaagtcttgatggatttatcattttcctcttagagtaaactaaatgccatttgtatgtaaaggatcaagcttcttcaactccagcgcgatctttgaaagtcgtacatttgacaggttcttggagaagcatgttttgcagcttaattgcatgaggatgaacaagattaggaaacaaaatgcaagggttctggcaagaagggaagattggccctcttgctcatttgctgagttacttcccctcctctgtattcaataccaatgggtcaccaagacaacaggaggcaggatgcactgggtggagttgcatttgcaactgggaaccactgtgtttaggcttttgaaagtcataacagggatgatgctaacatttatatataaagttctgtttgattatttggactaccatttgtgcgcaaaagtgaacatttgatggttcttgctgaatatgttattttacagactctctataaatttgaaaggaacaaaatgtcttgcacttcattttcacatgcagcagacagtccacagagtgaatttaataaacttcccaaacatgtggcggtaaggctgtgctgaaatgacttgttcaaggtcaatgggagatgaaggaatttcgggtgtcaaaatatcctatgctaattatcacttggttattctcttcatttgcattttcgttgacagtgtgttttttttcctctaaagtagaagaaagtgattctgaaaacctttttccaaataaaacaagcttgtgagaattttgctgccaacaaatctattccactattcttgatttcaggtaagataaattgctagcggttcaattctaaatgtacctattgccactgttgagtctcacacagactaccagtgacaatcagctcacacgattctcctctcaactcttccatagtttggggatggaagggaaaacgaggcagcaatgaaatgatggggaagccttatagaatccttcctgctatgctcctggaagaattgcaaggcccaaattggtttcagttctttccaaaatcaacagcgtttcataaccttgtacccactgagtatgctttttctgaggaaagactcattcattactcatggtgactctgaatgttttccagaggctcttctactgtctccattgatttaaccttgtgggtagaaattttcatccagggatgttgatgagcccagtaagcaactgcacccctgtacaacacgtgtgtgtgtgtgtgtgtgtgtgtgtgtgtgtgtgtgtgtgtgtgtgagagagagagagagagagagagagagagagagagagagaacatgttcatgtatatgtatatgcacacatagttgaggccactttatattttgagacatggtttctcactgaacctggaactcatcctgtctctacttcccctgtactgaaatcagaggtacatgctgataaacctgctctctctctttctgtgtgtgtgtggtgtgtgtgcgtgcgctggggattccattcctcatttttatgtggcaagcactttactgacagttccatttccccaaccccactataaggattcttaaaagatcctaaatcttacttagcaaggccctttagatcttcaccatgacttgaaaattgggggaaaccacagaaaggtaattgacaccagcaagtctttaagacattcagataatacagattccatacagaggaccaacaactagactttcaataacttctcatcaaaatcagtagaggccagagcataacaaaataagtatttccatatcataagatgaagatttggaaacaaacctctgtgggaatctgtaagggcacttctagagaaattagagaactagaattggtggcacaattccataagctaggcactgaattttttttaaaaaaatcagtgtttgtatctgtttcttgactacaggcgcagtgttaccaagagccatcttctctgccatgatagaccatttcctttcttaaaccttgaactcaaatagacccttcctaagttgctgcggttgggtgttttgacaaaacagaaagaaaaatagctgatagggagttctctccttttgttccaactatgtacatgtacatttcccagaccctcatattttaatagtcataatatagttttatttagctcaatcatcaatgtttacatattgtaagtctgtttggttttttagtgtctatgacttgaatttgccttttaaagggttttaagatcttcctgccccgtgcttggaagttcttaaagctatgcctttgtaggagtctatttcatgcattgttctgagaattttgtgagctattcaatctggaagctcacagactttttcttaaatcattattttttcctcattaattttctttattctctttttctgctattccatgtagatattgactttcctagattgcttaatacagtgttgttttgttttgttttttgagacaggactggccttgatgtcacagagacctgcctgcctttgcttcctcataaaaatacaatggtctataatatagtgtacaatttaatatgtttttatataatagcaaacataaatacatagttatagttatattctatataaccattggttctgttttttctattgcctttttgctgtttcctaggagttagattcaacacacccttccaagctttctgttgagagtttcaattctgccatgtttttaatctctgagacttttatgtttcctgaatgtggcttttgaagtaacattccaaccttgtttctgggatttcatatcattgttcatctctttaaggacattaataataactttattttgaagttttctctccaaatataatttatttttcctccaaactgtttcatttatttattttctctgtttgtagtttgcctagttgatctctatcttgcatgttagagtcctcccttgtctgtcttgggtgtctgatcatgtctatttgtggagaatttaaaaagttgatgggaggttctgagtaaatgtcagggcagtgatcgggctgagtcaagtgcttaggaaacctaggtatcaggatggttattttttatttatggacccatcacagtcctcagagatggtttttctatctttccagttcttttaccaggaaggaaagattctggatgaaacccctctgaaagctgagtgagcagcatcatctccttccactggatcctgtggtggacacatgtgtaactcagtctgtaccatctagcccagtggattttatcttactttctctggaaagtaaatatcattcttttgctaggattgagatacatcaccaggagcaagaggtgaggaaggcgtctagggaaacaatttttctcctgggtcctgatcctccctgtttcaagccatgctcttcactcccatgtacagctctgtctgatgctgccactgtctgcattcttaatgatccttcaacaaaaagcaagacagctttaagtttgactttcttcaacttgcttgatactttttcttggtcacgttttttgggggcttccaagggttttatttttgtctcctttattatccatgtatttatgggttcataaattacaaaataattattcatcaaaaacttttagttttgttttattttttgacacaaggtttctctatgtaatagccctgtctttcctggaacttgttttgtagaccattctggcctgaaattcacagagatctgcctgcttctgcctcccaagttctggggccaaggacatgtgctaccttctggccaagagctttaatgtagaagtcaaatctcacagacctcacccttagggaagacacttccaaagactaagagaactgacttctaatgggtcttggatgaaagagtcactgaaggatgtgtttccaagattttaggaaaaaagggtccttgaaggaaggaatataacaacaaaataccagtaggtacaggagcctggtgaagccagtgtgaatagcgcctctaggggagctctccccttcagtgcaaacagcacctctagtggaggtctccccttcagtgtgaatagcgcctctaggggagctctccccttcagtgcgaacagcacctctagtggaggtctccccttcagtgtgaacacacctctgtggagctctccccttcagtgtgaacacacctctagtagagctctccccttcagtgtgaacacacctctagtggagttcttcccttcagtgtgaacacacctctagtggagctctctccttcagtgtgaacacacctctagtggagctctccccttcagtgtgaacacacctctagtggagctctccccttcagtgtgaacacacctctagtggagctctccccttcagtgtgaacacacctctagtgcactctccccttcagtgtgagcacacctccagtggagttctcaccttcagtgtgaacacacctctgtggagctctccccttcagtgtgagcacacctctagtggagctctccacttcagtgtgaacacacctctagtggagctctccccttcagtgtgaacacacctctagtggagctctccccttcagtgtgaacacacctctagtagagctctccccttcagtgtgaacacacctctagtggaggtctccccttcagtgtgaacacacctccagtggagttctcaccttcagtatgaacacacctctagtggagctctccccttcagtgtgaacacacctctagtggagctctccttcccttctagaagattctgatgatgctcggtatgaacacatcagaagtgtagaaggcaaccctgacaaaatgcattgacagagctagaagccattccagacccattgcctagctcttcagtgatgcttacaggtaaggagccagtgtccctcaggaacatcccatcctctgtgagaatcactctaaatcatgaagataaatattcagatatctaatttgaacctgttgtaagttaccaaacaaatacaacatccactaacaaaataaaaaggttaagtgtgtataaaattgttaagtaatttaaatttaatttaaaaacaccaacttttggggtcgtggaggaatttataggggcttctagctgtttaaaagtcaagatagctcacctagcctctctgttcttctcatctgcctgctctctctcagaaagcatttttattgcccatcccttgaactgtaatgaaggctcatgataattccctttagcccctagaaatataattttataagatgcagattcataaacgcaattccattttgcttgaaacactccacatcataaaaaaaaaagattttcattttaatcctagagccattttcctcatggccatttctaatgtcctaggtgttggttcctagaatggcatctgctagatagttgagaccattcatcttttctgacataacatcaaagctgtagattattaattgcccaatgtgcatacatacatgcgtttttaatttctgcgccccttgttccaaaggcagaatcccgtatgaaagcctatttatgagacagaaaactgtctcataaatttcaagtataagcctggttctgtgaaaagcttgccctgtgagaaagtaataacaactgtttgtacagcacttgagcatcatgccaagtgtagtttgaggcacttggacaatacaattcaagctagcactcacaactgccttgtgagatggtagctactgttttcatttgaaatatgaagaaaacaagagaccaagtaatgtcttctaggttcacagaaagtaagtgacaggctacgagttgaacccagtgcacctgattcagagtcctacctctgaaaaaaacatagtcctgttctttaaatagctttttatttctctcctatgaatcatgctatcacttaattttgttgacaatgaaaacattaagctgttgtgtttttgtcttagtcactgttgtattggtgtgaagtgacacaaggcaacttattaaagaaagcacttcactggggggcttgcttacagtttcagaggatgaaaaaggacatcatggtggaaatcatgacagcaggcagtagacatggtgctggagcaatagctgggtgctcacatctgatgcacaagcccgaggcaaagaggattaattggcaatggtgcaggctttttgaaacctcatagtcaaccccagtgacacacctccttcaacaaggccatacttttcaaacatccttcccaaacagttctaccaactaaaaaccaagcattcaaatatatgacccgaggggggtgtccattttcattcaaatctccacaaatcttaacacaaatcagcagaattatataatacttggttctagcccaggaattctgatttaattgatctggtgagggtaacctttataaaaatgttctcgtttatttattatttctcagtgctgagactcaaacacagggcctttaaaatgctgggcaaacattctgctgttgaattacacctccaatcacaacctttgcgttaaaaaagaatccccccattgtacagctaaagtcataattcactgcccttgatcactgaagtctcttgcaattgtggagtctaagtttctaccttatggtgaccttagaaacttggcaaatctgcaagaaccagtgtcattcaacattatgaaaatgattttgggctctttgcactgagagttggtattagtgattatattgtgacttagctactcagtggtgctgtgtctgcaacacacatgtacccatcatgcacaccaccaccaccccaagtcaaattccagggtcctccactctttccttgagcccgagaggtgacataaaaccttagctcccaagtttttaagaagacattctaggatgaaagtgaccttgaagcagctcatgatgtcagcacagcagccatgttgccccttcccacaatgccaacggggtgtgatctgcaagagaacacggcactgtctacctgctctcctcctacctctgacatagtgggcatcaacacaggctaagctgctgagggcccagagtaccacatggctttcagggaagagatttgtccagcttttctaatggctcagtctttctcctcaatccagacaggagtccatggaactgatctgggactcaggcagcaggcaccaggctgtgttgtaatctgtttccctctatacacaagcctagacttcgactggtcaagctctcctgtatccctgcctccttctcctgcctctcatgactgaacttgtagcctctcccctctggtttgtgaaatgttctgctctcacccctgataaaaagcctttacgaccagttcagatttttgcttctctttggattggttctgtgaacccagggcacatctgggaagctgattcaactcaaagctgtctctttggagaccagaatctcagctcagtcctctttctactaatcaaagaattgcagcctaggcaaacagccagattgggtgtaccaacaagaatatgccattcctcagtcttcttctcagcatgcatttactgagcacagagagaaagggggctggcttgctcttaaaacctcagcttctgttgtaaacagcagagacatagaaaaagtgattatgctacagcatactgtggtgtgactgtttgtgtcaccacctatccccagctgcccacacatacaggaaaccctgtcatgttcaaatgttaaattctcaccctaaggtaatggtattaggaagaagagcctttgggagatgagtagattgtggaacagagcccttctggatgggattaaaagtcttataaaaggtctccagagagacccttatcccttatgacatttggggaccaagtgagaggatgactaactgaagacacaaaccctcactggacagcagccttcagagccgttagaggtaaacttagtcttctgtttgcataaaacatgcctgtgatattttgctacagcagcctgatcacccttagaaatggcttagggagttagaggcggaaacacttgtactgggtcttgcgaaatggactggaatgttagctaggttgttaaaaatattgcaaactgggtggcttaacgatatattgtccatcagtactagaagctggcagtctgagatgaagggtcagtggtgttgattccctgagggctgtcaggaaggatctgctgctcccagctctgggggtgctggcagtcttgggcatcccttggctcatggaaccatcaccatggtccttaccttcatctctattctctctgtgtgtatttgtggccaaatctctttttgtgtaaagacaacatgcatgttgcattgagatgtctaccctgcttcattgcaactacagtgacaacacttccaaataaggtcacattgagttattgggggtcaagtcttccgacatgtgagttagatatatgaacagggacacaattcaacccataacccaatcacagaaggctaggaatttgaattctgagtggagtggagtggaatgggcaagaactcagaagggtagaatgcgaaagggcgcatggccggtgtggaaatggtgagtggacaggtagacatgagacaaggaagtaggctcgaagcactctgcataaatatctctagggcagatatttatggcatttgccagatggaatggtagaaaaaaggactgggaagtgtgagaaggtggcatctgaaagttcgtgtttaagcctgtctggaattagagaatggcttagaggtagagggctttggcagtagctgctgagttcactctgtgtccttaggcaagtcgttcaactcatggagctgagtttctgcctctataagtggactctgggattgcctggcctgctatacactctgtagaaatggtagcattttcacttagacctattagacaggagttaagattaaacaaacaaacaaaaaatggctttattcaagtcatggtgaaagacattgtctagtgccgagctggaatttggagtaagttcatgcagcaaagatgagtgacagggatggagcatctgttaaggttagtttccttcaaatgttgcctctaggagaaacacctatttcatgggtccaggtcatgcgaatgtggcagcttggatagtgggctatataggttttgtaatcagaagagatttgtaagaagtgactggcctggcttttgtccctgcagtgatgattcagatctgtggcaggcacatgattgcccttgggggtgagagacagctggtgctgggcagtcaccaagagacaccactggccccagggcagaacccacagacgacacctcctcctggaatgcaacaaaggtcactggcaggacaaaccaggagcctggaattgttttcaattcattttcaacctgatggtgagcggaggcttgttgggttcatatgtttagagacagatacacagaaaaacaagacagagccaaacactgcaaatgaggtcttcttcttacttctgaagaaaattaaagacacttgtaaaagtcacataaagataatgtttttaatgttactggtggggggggtgggtacagctggagagatggctccgtagttaagagtatgtaagaacagaagactcaagttgaatttccagcacccacatcaggcaactcacacctgcctataactccagctccagaggatgtgacatgcctctgaccaactcaggcacatacacatacacagataaacatgcatacatgtaaatgaataataagaagaatattttaaaaatacaagaagttactggtaaaaatgaaaatgtacactggaccaaagtgaatgaatcaatccttgtaagtcaaggtacacatttcttgggattctaatgtgtcaatttttttcttactgccatttattttatttttattgaaaataattttatacactatattctgatcatagttttccttaccccatctccttccagatcctttccacctccctatccatccaactctatttcttctttctctttctttagaaaacaaacaggcaaataaaaacaaaccagatttaaaagaaaagaaaagcatgagaatatgcacaaagagacacatatgaacacaaaaataaaacccataaaaacataaaattggtagcttgttcctcttgtggaactcctaactgcaggaacaggagctgtctctgactcttttactggcttttggaaccccacttctcatactcagttgccttgccaagccttaatacacgggaaggtgcacagtcttactataatttgatatgccatgttttattgatactcatggaagatctgacctttctggatggagatggagaggattgggggatggggatggggagcagggactggaaggggaggatggagggaggctgcagccaggatgtaaaataaataaatgaataaaaacaaaacaaaacaaaaatacaaaattgggaaccataatattcaaacaaaaaccagtaaggtaaaaaaacaaacaaaacccaaaatgccaaagtcatgtgagaaaaaaaaaacatctacaaaaatatcattgagttcatttaatgttggctatctgctgctaggtatgggcccactcacaagcgtggtttgtatgcccagtgagactccgttggagagaactaatttttcctttgcaagcagttatcatcagagataattttttagtatagaatgggagctcacgtccacttccccctctcagtgctaagaccccatctggcctggacctgtgcaggccttgtacatcctgccagtccctgtaggtcagtatgtgtgtcagtcttgctgaatctagaagatactgtttctttggtgtcatccatcccctctggctcttacaatctttctgcctcctcttctgcaaggtttcccctaccccacctcctgagggaaggagtgtgataaaaataccacatttaggagtgagtatcctaaggtctctcactttctgaactttgtcctgttgtgagcttctgtattagttcccatctacagcaagaggataatgctaaatgaaacactgatctatgagtatcacagaatgtcattaggagtcattgaattgctgttctagtagcataacaatagtatttcacctagacccactgcctgattacctagtcttgagatcttggccacctaacctgtatcagtcataggttctgtctaacggagtaggccttaaattgaatcaaatagtggtagtcactcccacaatttttgtgccacagttataccagtgcatcatgcatgtgggtcaccattgtagatcgaagggtttgtagctgccttggtgattatcattatcctatggtagtgtaccaagtaccttccagttctgtgaatactagtcagcagaagtgaagactctaagtaggccctacctttgcttctctgggttcaatgaggcacgtaagagccgtcttcagcaattgggccttgccatcagtttctggaaagcaatcaatagccttggcaatagcccaagttgtttggggaattccatggtagcccatttttttcccaacaacttaattatatttaacctgtttctgacactggaggtttcacttggtggcaaaagatgttactctttgaatgtatgtagtgtataaactgaccacatgactgactccgtggtatggttgtgggaaaggttttttgttgtagatacgagggagaaaacagctagaggcatctggaagagttcagagcagagaaagaaagcagtaaagtgaccatggccagcaaactggatctggctatgagggaaacaggagtagagcagagcagagagagaggtagggaaaggggggtgggggaagaagacaaaggaagtatccagagaatacatagctaaaataacatggttataaaaagaaatgagaagctgggaggaggggagcccatgagttctagaagtttaggatggaggaaaaggtgagaatagctgagatgctagcatagactctgaaatgtgtaacaggtacttgtgatgctgagagagcctgaaggccagcatgcacttggatatgctaataggcaccacagatagtcatttgccccttcttccagtgctaagggaaacagctcctttggtagaaggaaccagtttcacaagttcataaggactgctagcttttggctaaccatcaggatttgggaaaatccagtttcctttggacttgacacatagcagaggaggagcaggggaaaagaagtaagaaaatgagagatgagccgaaacaggaacaatgagagataaaactctatcttagttagggtttctattgttgtgaagagacaccatgaccatggcaattcttatgaaggaaaacatttaattgggtggcttacattttcagatgattagtccattatcaatcatggtagcatgcagcagtcatggtgctggagacagagctgagagtcctacatcttgacttgtaggcaacaggaagtggtctgagacactgagcatggcttgcgcatatatgaaacctcaaagccctcccctacagtaacacacttcctccaacaaggccatacctatccaacaaagccacacctcctaaaagtgccactccctacgagattatgggggccaattacattcaaactaccaatttccatccctgacccctataagcttgcaacaatatcataatgcaaaatacatttaatccaacttcaaaagtccccaaccactgcaaactccaaacacaatgttgtgacatttatcagaggagacctagatactaagagaagacaaaagatttatcaatgttttccaaaaaatacctaacctgagagaatgcaattaaagcacaatgactactgagagtgtgatcactgggactgttgaaagtgctttctacccatccaattacaggccagctaggaggtagcccaattgtctcttgtcacacagagaaatgtggttgggggaagttgaaagactctctctgcttcaattttgtcttctatggagcaggactggccacatgtgctgcctacattctctggcagggtaggcagtgtcagttcccactctatttccatgttctatcttcatgctgaaaaatacagctcagaataaaaatttaaacttctgacaggttttgttctgccttattggaagatccattctcctttgatttaagttatcaaacaacacctgtaaaccaggaactgttcacaaagacctgcgtatcaatcttcttttaaataatggccagagcaaatatcctccagctggccttggtcttgacagttcaccacagtgcctgatactcccactgtctccctggtaccagcttacttcattaacttatgctacttccatgacctcttgtgtggcggtttgaataagaatggcccccataggctcatatatttgaatgatcagtcatcaaagagtggcaatacctgagaaggattagcaggtgtggccttgttggagggagagtgttacgataaatatttctgccaaaagctgcctgagccccaccgccacatgtgtgctttacgcctgccacccacccgagttaggcccaaatgaatacacagagagacttgtattagttacaaagctgcttggccaatgactaggattctcatttgttagctcagtcccaattaccatacatttatatattttataggacttatcttatcggacaccttattggcgtccctccttgctggtgaaacacatcgtgccgctggagcaggagccaaggggaaaagagagagggtccttcctgtttctctttcgcttaaatatgagtctccttgctatgtcacttcctgcctggatcagcacttctctactacatttcccagaatcctctttgactcctaattccgtctaacttgctgtctcattggccaaacagtattttattcaataatcaataagataaacatacacagtagtacattccctatcaggagtgtgtcactgggggtgggctttgaggtctcaaaagcccatgtcaagcacattgtctctctttcttcctgctggctccagatccagatgaagaactcccaggtccatctccagcaccatgtctgcctgtgtgccaccatgcttcccaccacgaaaatagactacacctctgaaactgtaatcgagctccaatgaaacatttttccttataagagttgctgtggtcatttgtttctcttcacagcaatagaacattaactaaggcaccttgattattctgtgtgactttcttccatctcaccaacacattctcttcaaactgctttctccttggctgtttatctccatgtgagaggctatgtcttgttcacctggatttctagccccaagcatgatatctggttcatagcaggcactcaggaaacttttgctgaacttgcattcccatgatcttgtgtgagaaagaaaggaagaaagagccacctacagaagagaacgtgggtgctacagacaagcatctatgctggggcagcagagtccgtgtggtgcagctgcaaaccctgtcttgctttcttcttcccctaggtaaactcctttcagagctttttccagctatgagagaagacagcaaacagcgacaggaactcctacaaggagcatccatgtttcacctgcctctcttaagcagcctgaatttggaaatctccagaccagagtgatactagaaaaagcacagaacctgataaataacaatgggtttggcccaagcccaatgggaggccaatatggtgtgtgttctgacacaagagagcaggtcatttctccagtgtgtgctgcaggaagcctgtgttaaaagaagcaggccttagaaggtgctacagtgcacaaccatcagagtcagaaatctgggatcaaattctggtgacctattgactagaagtgttaacttgaacaagtcaatggaccactcttgacctgtttccttgtttgcaaaatgagtataataacatcatccacattacagagatattgcatgaattaaatgagagaaggcatactagctggcacatttttatgtctcatacacagagacacacagacacacacacacacagacacacacacacacacacacacacacacacagagagagagaaagagagagagagagagagagagagagagagagagagagagagagagagtcatcagaacaaataaccaaaacttttgcagttttagagccagaagttcaacatcaagagatcttcaaagcttactcctccagggctctggagttggaaatctatttttcaccccttccagcttgaaagttccatacattcctggagttacatcaatccaattcctcttccatgtttctgtgattttctgcacatgtctgcctctcaggcccatctggttatccaaggtgatctcatctcagcatccctaacttgattacttaagcatatagcctctatttccaaataaggtcacattcatgagcttaatgatatatacataactcattggggacgaccctattaacctaaatctgagtgctttttttcagccagaaatttaggaggctcctgtgctggctgggtttgagtctgtctctaccacctgctgtcactggactttgtacctggtttccccatccattaagtgaggctcattgttctagtcaacttgctgttattgcaatgaataccgaaggtaatcaacttaagaagaggaaagttttctttaggctcatggctttggaggtttctgctcaaaccatggtggggaacatgtgccagagtaaagctgttgactttacggtcaagattctgaagagagaagaaaaagctggggtctcactgttcctctaagcgcccttccctcctcttaatctttcattatgccctcatagcactgagttgggaacccaccttttaacacaaggatatagttgtttgttttactctttattctttggctcttcgggggcatgacatccagctcccaaataaaccacacagagtcttattcttacttatgaatgcccagcccaagcttagcttgtttctagccagcttttcttaaattatcttcttgcctctggacttttacctttctctatttctatcttttctttcttctgattctggcccggctgtgtggcaggtgactggccccttattttttcactcctcgatctcctttgttttgtaactcaatctttcttcccccagatttctcctcctatttgttctctctgcctgccagtcctgcctatcttttcccctgccttgctattggctattcagatctttattaggccaatcaggtattttaggcaggtacagtaacacagcttcgcagagttaaacaaatgttccatagcgtacatgtaacacgtcttcatcaacattccacaacacaagggtctttcaggaacattccagatctacactgtaatagcaaccataccaacctcctacgaagatcaaatgagattattcctgttgaatatttaaaatagcatataaaataaatgttcattccctcctactacccgaggtaattacagtaagtagcattaagcgaataagtttctgatccttggagtcataacttacagaaaatcatgaaagtgtctcaacttcaaaataggatcccagacagtttcccaaattaaggagatggctattaggttttccactactaaagtgacaccagcgtcagacaccagacctaactaggcagcaaagcatctctggggaagagcattttcaacagtgggaatggctagtgcagagacctgagcggacacagctggactgtttggcaggagggaagcaagccaagctgttgagggctgaggagtaaagggatgagaagaggtttagtaagacttgacaggcccttgtgaagaatttggattttgataaattatgtgggaaactgttgggttttaagaaaagattgtcatggccctatttctgtattagagggaggccctaatgactgtattaggaaggaaatatggtgggccaggcagaagaagtgggacgatcaggatcaggaggtcactgtggtgtcccagactgataaaaatgccagcatggatcaatcaaggcctgactgtgaccctggagcaggtcagtacctggtgtgatgtccattctgaacaggcaagatttggcattgtcttgggaggaagagaacagtcagacatgactcttgactctgaagtttttctgtcccctgcaattggaaagtagctctgttaacttagatgtgtgagaggaagttagagaatgtgaattgttatcattgtgacctgttaagtttactagactactcacaagcatggaaatgcaggtgacagtgagagtggaacctacaatactgagcttctggggcaaggatatagtttgagagtcatcagcaaatggtcatatttacctcagaggcactgtgtaagacactgaaggagtgatcagaaaaggaagccggagactaagggaagagctttagttactctagagccaagggtcagggggaaagagcatccagactagtggaagggagggaaaacaggcttgagaagtcaaactaaaggcaatgagcagagactggacagctgaacaggggtgttttaaaccagtggccctcggcgtttccaggccagccaaggctggaaattgattagaaaggtacagcgtcatggagtactggatgggggactcaagcgtggaactcttcagaggataaaaaacaaacaaacaaacaaacaaacaaaaaaccctactctagtcacagaatcgcctgcacaaatttacacagaaaattaaggaaacaaacaaacaaacaaaccaattcactgggtgagtacattgttagagacttgttcaggctcaaacttgtaacaaatagatctcaaggaaatgacccccccccaaccttccactatgatggctgtttggagaagaggaatgccccccatttcacttgaccagggaatgctgagcaccaaacatgccagacattcctctggctaaaaatgggggtgctattccagggttagcaacactgggccattaattctgaaccttctgagaattgaagcctatcccaccccccaccatatccaaaatttcctctagaaagccctagcagaattccatccccttccattctgagggaaaatggttaaaattaggatcagtcccgagagattgacaagctagatgtggagaaggctggaccctgaaataagctgtttcccaccgcgaatgggcgggacagaagcctctggtcacaacccagcggagggaccgccccttccaagtgtgtgcaagaagtctggtccccagctttaaaattctggactacaccgcgtgctgacctctcctctccccccagtggtggctagcccttcccaagtgggcagttgtctcctccctgtccagcccagcagcccagcagcggtcgtcctgcgcccagctgggctacaagtggcgagtgctgcagccttgcgcagcgtgctctgcacactagcgtcttggcttgcggctccgcgggctctacgaagttgaaaagctagctgttgcctgtggcatcttccgcgggcccccagctccctgcctcgccttctcccttccctccggagcagagggtcctagtgagccagcagccagcagccctctcagggtcttcctgcctgaagtgcaactatgctgctagggggaatcctgctggtagtgcaaggtaagaactaatagggagacccctccccgcgcgccccaggacgtcctggaaactcagccctactctggtagggctggtagggtggggctcccggtgttggctcagtcatccaacggctcttctggatcattcgcagtcactaaactccctgccctggtcaagcctgggatgggggtgggcgtggagtttcacagaagagggtccctggagtgttgagagaggtcatgcatccttctctgcctccttctcacatgcctgcccaaccttccccaggtagttcccagggctggtgggatgctgccaggcagaaacccaaactgaaagtctctttgtgcccgcagccttgcagctttccaatgccctggacctgcccgctggctcctgtgcctttgaagagggcacttgtggctttgaatcggtgtttgcatttctgccttggattctaaatgaggaaggtaagggggctccgtggtgcctcaggtgaactttattcatggcttgcccccatacccccccccggaagtaaagttatcttggattagttccctttaggggaaaaaaactgtgagtcatgaagcctccttccaaaccctcctgcagcaaggagcggccagaaaaactatgaggaaggggacagctgtgtacctggctctgagtaggccctcctacccaccacagcacaccctattgaaagggacttaggggaagggggtcctgctaatgattgacgccctctagcctgtgctccctgcaggccattagccttgctagtcttcagcaggcacgtgcctgagctgagaaagtcgatggtactgttctcaggaagctttgcggaaatgtttccacactgctgtaagggtcatcagttctaagacctaccccttaggtgcaccccaccgcagttctgcctcttattaatcctttaccatcctgggtcactggacaaacgagttaactccaacagggagtatatgaagccatggggctggggccagttggtcatagtctcagtactccacactgcttgggttcctgggacaaaatttaaatgaaaagaattctgatgtgtctttcttaccctttgtttacagtaaaaaaaaaaaatcaatagcagacacttgtgtccctcctcctttcctttctctgatcctgtgaccatcattttgaagctcgactctctagctcattatttgggcttggagtggatcctaccaaagcaatgctgccacaagggaagccaggtgaccttcctcccaactcagtagtcctccagttcaaatcatccagcctggctccctggaataggactcttgcttaggatgtaggaactgacttcacagctctccctgcccatgaggctttgggagccttgcctacataagtttccctgacccacatacgtggctgataagagcactggcaagagaatccgagccttcaaatagtcacatggttgactcggtgaccaacactgaattgttcagctagggatataaaccagaaggtactaagtcagtaatcatctttgtctcctatacttgctaggtcttgtgtgcagtttacttaggggtacatgagaaaggtcaacttgctgaagaggttcctgccttgccggtggctttaggaaagactttaagttcatcacccccattctattctctgctctggttgtgtttaaaagatggctctacctatgttatggcagtggatttgggagcattattctttagtttgcaaggcttcgaaaagtttctttaagaaagcatcaggaagacccggccgacatgttcctacagtttcctttcccttcttgagagtgtgattcaatggtgtggattgaggcctgagaatttctcacaagttctaaggtattgggaccactgctgcttctactgatctgggaaccacgctttggaaatccctgactaccactgcgtatgcactcatgcacacacacacacacacacacacacacacacacacacacacacacacacacacacacctatacctatgctgatagccccaagtaagaccaggatcaaaataaaccacccacacagacctgagagtgaacagctctgaatcttgtgtcctaagttcacttgtgtcaggctgctgtagccctaggatgtctttcttaccaccaggagtcaaagtccttaggtgctctctctgtggcctcctgtaagatcaaaactgcctcccatccagaatcctgagtgagcctgctgagcacaggaccctcccgggcaggcaggaagggctgcacggagctggcatctttgcaccaatgtggccattaaacaaccacctccagggaaaacaggaagatgcctttaggaaaaggtgattacaatttaatcacataataaaggcactgtggctcttccactttctttcatgtagtcactgctttctagctggaggctaggaccactggcttggctggatgacattaattcatcccgttctgaggactccagggcacagtgagcaagttaggctcccatcctacagctccaagttttaaaggctggaagttggacatacctgcccactacagacactggcagcaaggcagatgtgtgccagctgctgtacttgcctgtaaggagtgattgctgtgaattccccttactctagtttgagaaattaaagtaataaaattgtcccgggctaaaatttgggaggctatttgaaaacctccactttattgcagaaaccctttgaaagagattccatacatctctgtgtgctgcgtccccaagaaagctgtgaatgtcacaaactttacccaccagtccttgtaacacaaatagcacttcctatatgtccttggtcagtaaattaacctatagtggagagagcaatggcaatacccagtgaagagttaattgcagaaatcaatctgcaaattagaatttcctaaaagagaggcaggtcttggaacagctgatgagcaacccaagccacatagcccctatgaaactatgcgaggcccagttcttgagtcatctgagtgttagatctctacacacttcttactacctggttcatagccatgtgtatatatatatatatatatatatataatatatatattatatatataaaatttctaccttgaagtaagtgatattatgtcagactcaaattggaacttgttctgaagtcttccatttgaattcaatcttaggaaataagagacccattttatactataaaaacttctgcattcatttgtctttaacaaaatcccctctattcattcctcattcagggaatactagatcccttttgagcaacaatcctcaactaaaattgagggtgtcccttccactttcctcctggcagctgtaagggcagaagccctttggctgacgattcttggagaccagacagttggcctcacaattaagttagtacttgagcgggctttgctcttgtttttggcttggtatcatagcctccactctctaagaagccattaattgagtgttgggaagaagaacaaaactaagcataggtactacgtttttacttgggcaaagaaggtagatgattctgactaggagaacgtaaacgggacattcaaagcatttataaggaagatttactttgtgtttccttgatagtattcaaggagggagaaatttcctaatacaagaagcagatgtgatggcttttgtatctccgagcgaacaactatatggagctgggaaagtataaccacggggcagaacgggggggggggcacagtagagtgtactaatatctcattgtagtgataggcatatctctctctctctctctctctctctctctctctctctctctctctctgatacctctttcctacacccaaactcttcccttgttttgtttaacaaaacttgccattggccatctgagtttcagttctgcacacaatcatgtgccagttattattaatagtgataaatcctgcctgattcttcttgaggcccagctggaccctaagtctggcaagaatcccaatgggactttatggaagaggaagctatattttccttcactgtgctgaccttggaaggccactgtagcatcccacccagatatcaccaagttgtcaaagaagatcttgtccccattggtcctgtgttatccctggtggccattttgtacagctttcccagtagaagttccactcacctacaacccagctgggtagaagctggaagccagaacaaatctagaatgttccttgggtgcctctcaaaaagacatcgacagcagaaatttcgctcaattgctcctgctgcatcagatgcagctctttggagtttccctggtgttgctgcttccagtttgagcatgggcctgagaaacttgggtcccattcaggctctgcatatagtgtaagagctggacttcagaggtggtccaatgcaggctatctgttttgttgttgttttttacactgtagtccagatggttcaaggttcatggcaaccccagggcaggaccctgtctcttctgctatataacattcctttcctctgtatagatggtgaacagtgagccctggatttcaagccttacagcgtctgttagtaacatttcatcagagatccagttagatgtttaacatgtggaagaacacagattcccaaatgttgtatttggagcctatcacacccacagagaactacattctatgtcatataaagatatatttattctctccaatttgtaacccctgcatgcagtcttacagcatgtaggaaaaatcttggcgcataattgggacttaataggtagttgaatgtaggtatccagcatctgaccatgaaaacaccctgtgccttttcccatgttctactgttttgtccttcaccttcaaagtcagttccatgagaagaacaggtgattagaaactaagaaggccagcttatattagaaccaggtagttgccttagttagggtttctattgctgccatgaaacatcatgaccaaaagcaagttgtggataaaaaggtttgcttggcttatacttctagatcattggaggaagtcaggccaggagctcaagaggaacaggaacctggaggcaggggctgatgcagaggccatggagggtgctgcttactggcttactcactctgttttcttatagaacccaggaccataagcctagggataacactactcacaatgggctaggccctcacctatcaatcactaattaagaaactgccctacaggcttgcctgcagcctgatcttatgcaggaattttcttaattgaggttccttcctctcagatgactttagcgtgtgtcaagttgacattaaactatccagcacaggaatgttcattatttctcctctctagacctcaaaagagaaataaataaaggggctggagagatggcttggtggctaagagcattggctgcttttccggagtccctaggttcaattcccagcacccacatgacagctctcaaccatcaataactgcaattctaggctattggatgccctcttctggcctctatgagcactgcacacacgaggtgcacagataaatgtgcaggcaaaacacccacatacatatacaataaaatgacaaaaagtaggaataataaaaatgcctgcattttaagatttttgtgattattattcacactgagacagtaacacactgtatgatacacataacctgattcttacacaatcaccagatttgtatcttagcaacatcacacacatacatacatagattttcattcttctaactcagccttccaatacagattctggggtatgaggatgtgtcttttgcaggtagctttgtcacttacttttcattacagcagagggcaaaccttcttatcattgttctgtgttaagcccctgtgagcttcatctaatgtgcgtgtctggaagataagtgtgtgttaagagaccagactgcttctcacacctagtttgacatctctttcagcagctcacatcatttttctttataattcatcattttctctctgccccttactcttcctctcactccagcccgttctccattttatctgtctcacagagctggggcctcaacctcaattagttcttgttactgttggtcctggtaccttcacgagattcccagggtgctgatattcactccttggattcaggcagccctctaaccttgaccttcctgtctgccagcctgtttgggagatatccttcctaaccactcctctttggatttagcctggacagcttctgcttggctggctggcttatggaatagatgctgtcaatatggtcagcctctctctaggccaatgttcaggctgagttcctccccctcagattggagtgttgactgggagctattctctggatcctggacctctcctccagagatgtctgtggatttttaggatgttttctttctcttaatcacagaagtcagccaaggtcacatagggtgatgtcatgggactttatgtttgctttgccatcctcaaatttcttaacctacaataaccttgttttgtaatgtgtgtgctgcaatattcaacaaaagttctggctctttctgagtgtcttggtttatctcagcactcagaaacgtgcagactgagagttcaaggcccacctgggctatagctcaagttccaggagtgtgtgtctcaataaaagcaaaaaggagatgggggaagagaaggaagaggttcttttaaaaatatatttatttatttattttaattttctgtgcatggatgccttgtctgcatgtatatctgtgcatgatatggttgcagatcccgtggccagaagagagtatcagatcccctagcattggagttacaggtggttatgtgccaccatgtgggtgctgggaaacaaacccaggtgctctggaagagcagccagtgctctaaacctctgagacacctctccagcccaaacatcctgatttttaagtccttatccttaaaatgtcagtgtttctttttattaggttacataaagcctggtcctatttctatcttatgtcacaaaattgatgttcaagcatttgagtgaaatctagctatgctaatagaggttttggcatttcaataagtagagctagctggtaatgaactcttcttgggcattccagatgattttcatacctgtcatgtttttaatactcttcttcaattttttatatgcttacccaatcaaatatatcccaaagatgcattcactctgatctggagtcttgatgtgtttgactgtctatcaactagaagacatagtactgttgcatactgaagtatatgttgctagtgaaatgtgaacaagttatttaagagcaagaaaatttagtgtgtctgagatttctgtcccaaatgcctccccaccccattccacctggagattcattttcaaccctggttggacagcacctgaacatttcttttcaagtaatcatgttcagctcctaatccaagggattctgatttattgggccagaaacaggaccaaatttcacactgttagataaacttactggctgactgacagactgactgattgacagactgacatgcatccgtggttgagaactgagtgtggggaaagctgccattccatagccccttcaggtacagtaaagaagagacaccgtcttattagaaaccctttaatgattatcatctgtccccaaagttcctgtctcagcattcacagtctcagcattaacagcattcatgatctgcttcaaattatagttctatctttctcataaactgatccctagtacactcttaacacatacgttttctcttgtctctggctctgattacactgttctctgcagccgcctttctattctcttgtcctactcttgcctattttaaatgctgctgtgcctgagtataatttaattgtttaatgtagttggactttctttgggaccaccaactcctcaataatgacacaaagacttattactaattataaaagcttgacctttagcttaagcttgttcccagctagcctttatacttaaattaacctatttctactaacctacattccaccacatggctttttatctttccttcctaatatatgtccagcttcctcggtctcactggcatctcttgcagctccagattcttaccctcagttcctctttctacctggaagtcctgcctaacctcttctgcctagatattggtcaatcagctttttattaaaccaatcatagtcatacatcttcacagtgtacaaaaagattatccacaactatttaattaagccaactcaaggatctgtatgttaaaggcttggcccctagtgtatagaactgggagagtgtgttggaatatgggaagcccttaggtgctgaggacatgtccttggaaggactttaggaccctgcttgtcctttctctgactgtgtcgattccagatatgatggttttgctcttctgtgccctcccatcatgatatgttgccatcaagaggtcacacgaatggcgctacctaaccttggtcttgaaccttcaggaactgcaaactgcatgattcttttttacatgtgaaactaactgcctctagtattttcttgaagtactacaaagctgactaatgcaaatgctataaatgttttaaaacccagtaactcaagacattccacaatcatcccagatgaatgaggcatttcccttccctccctttacacagagctctccactttccatcttgtcaatagtgtctcctattggagtctccacccctttacctcatcagaggcttggtggagagtatatggcaatagtcaacaccctgcacctaatgactgcctcatgtccttttgaaagtagatgaaaaaccctcaacaattccccttgtaatgaaagagtttgtgtttagtagtcccttcctactggatgaattcaaagacttcagaggctcgcgttgtaatttacagatgtatcagtgaagccgaatccacccatgactggtctgtgacatgtcagtggccaaatagctcttgcgttattctccatcaaggctcctgaatgtcttgagcctccaccactgtaaacaaccacagtgcaggcttgagagctcttcttctggctctgagaagcagtttttggccaacgattattagaatttgaactaactcttagacatagtgtttttaaggaattcgtgtgtgaggtgtctatagtacccattttgaaggggagaagcagagatgaatatttgtctgctccaggcaagaagtttcttatgtagggatgtggcagctaaggaaacaaaaggatagagtgtgtggtcagtaaaatctgctggaatgactgatttccctgctttatgtccttgagggattctgaggctaagaaggaaataaggaaataatcaagcagtgtaattccagagacccataggatcatgaatgaatcctatgttccataggaaagggctgttaaagaatatttattccatcagcaagctttgcagtgcccatgggagctatgttagtaggtgggggatacattacatggggtacatgtgtgtgaagttcatagacacaggccgtccttgatggcagtcatagaccaatggaactaaacaagtatctataatttatgggagagatcagaaggaactatggtagtcatgggttattattgtaaataacagaaatggtgatttaagtaaagcagaagggaaccattttgaagggaaatcagtcagctcccagcaccaataagctagagggctgtatttgagtgggaatggtgagattctagatctttctagaagaactatttatataaactttccacaagacattggttactccactgctggacctgtccatccagtagctctgaggctactctgtgtagagggaccttaaaacaggggcacaagctaaggacttgtttagtagtctgagaggtgatatggggagcagggaagaaatgagtaaaatactacaaaatagattcaattggctatgctgggtgagtccttgggtgcccttaatgagtcaaggaaagtgaccctcagatttctagtttgggaaggtggtactaagatttggaacaaattgaagaggaacctcagattcaggataagaaaggacatcgtatcttctaaactgcttgggaaagatccaagtgagagtctctagcggatgtttgatgtaatgatctatagtcactccactctggtttgcctgcagggagtttctcgagaaactttttcagagccagtgtaaggagagacaaatcactcctggatgccggataatcaagttttgacctgacctttgagtacttattgggataatgaggagccaggcaaaagcacagactatggtgctgaaacagattaataactaacttagttatttgtctagagactctccagcacaattctacatgtccagctggggatgatatgttacattgacaagccacaagtacagtacttaatgacagcccatatccaaggtggtgtattctttttgagaatttattttcctacagactagtacttcaaaccagctaaggctgcacttacaacaagaatttgtcatccaaatatttacagtaatggcatcatttgtcttgatattctaagatcacaagggtctcctgtcttaacttttctaaagttattttatctgtttgtcctctgccatgtgatccaaacccagatgaccccctagtgcctgagattacatagatctataaaacagcagagagaagtacagcagaatttctcaggaatgaactcagaagtgcgtcatgtgaggctatcttaaaaccagaagaatctacattatagctgcaataaactttaaattactgctccgttttttattttcttatccagctgatccccatcacacctcatctctttttcattttacattttgtttacctccttcctttcagttacatgctcctcagagaagactcgagttctttgtacaatagccgcttcaaggaactataagtagttaacaagagaacagttgtccaagattaagaactttaaaaaaaagtggaacatttgtattatatggccaacatcttcactctaacctggttatggtactaaaattattactctaacatgctgaagaaaccatctaagggtgatgaagatgaatgggtactcagccatcaaaggaagcagcatccattcttgtttaagccctccactgttagagatttgaggttacatgatataagtgatgaggctggagtattggtattaattatagcatcagcagaacccaaagggtgatgaatttgatgcctgtcaataaaggaatgacctactcttgttctacagagaatggcgatgggatgtcaaacaccctttgtattccaaaatagggtcttaaaataatttgtaattttcatttaaattattaggaggcttgaagctattacttgatctgtcttctagtgttgtcaaatatagcacttaataaatgatgcaagttgtcaatagatgagtgatcaactaatagttcttctagtaattgatttatttttcttctatgaaactgaagaaaccaatggtggggagaagaatccgaaagtcatttgcagtctggggcagagagtggctacagagtctccaagtacacaaataatagccaaaatcttgatcacagatgacagagccacctagggagactggattagatgataacagcaggaggcctagaaagctgatggatgctgagggcatatgcagaacatattgaatggaacctattgctgtttggtgaaaaattctcagcaaaaaagatttgcattttagaagacagattcagttgtgttttgtttaggaagtggggaccagagcttgcttgtagattagtgggaaggacgtagcaaagaaagaggattcatcagacagagttcaaatcaagaggatgccagaggatgatttggttttaagggaacttcagtgacagaagatattctacttgccagtgggaagtggaaggggaaccctgtgacatagtcacatggtagttagggtctgtgacatatagctagcagcactgaatagtgcctgccaagcacaggcgtcaccctgatctctgactgtcataacaatcttgaaggtgatgtaaccaattagtaagtttacagaaattaaaataaaaccaacacagagagtgttgccagccacaagcttgagcttctgtggtccctggaccatctcctctggtatgtaggatggcacttgtatgcttgcagaggccagcaccaggaaagacagactggaagacttcatgccactccagagatcatggagagcctctaaaaaatgttggtgaggctacaaatcctaactctccccacagtttctcagttacagctaatatacatcccatgcggtcatgagcccttgggaagaaaacagcagaggcaggaaaatatacttgatttttctccataacagattggagtttgttcttagaaccatttggaggattcacttctgaggcctgtgcgtaatcttggaagaaaactccagggaacttcatggcctgacctatcacactttggcagttttatgggatactcctgaacctcatcttgtcttactgcagaagaattgagaatacactcagctcagcatgcttgcaagctggctgtcctaccagacgcacaagccagtgcttattttctgttcctcgcagaatggcaatgctgctgtgcggcagtgtgatctacagcttagcaagatgctcggagaaatttccatgccttatttgagaacattctgcctcactgccaaagagagctgaagtgttgtttggggctgtgcttatgaagagatggctttaatatgctgtgcttcccaagaaaccactccatgtgcttgccagtgtcttaggactgaggctatctaactcaaaattacaggaactgaggagcttttcttcctttagcctctagaacattctatttctgaaactttgtaaatcacacacatacatatcaaagtccaaaggatttgcttttgcaaatgtgttttgatccttcaacaagcagttttaaagcttaaagtttactgaaagaaatattttgtgttctattacaaagccttaaaaaatgggagtaagtgttggaaatcatgtctttgtttctgaaacattttccttttttcacaactgttgatgggaaatacataaatggtgtgtgtgtgtgtgtgtgagagagagagagagagagagagagagagagagagagagagagagagagaatcaacactgacaatgtcctcttgaattcatatttgctacacagaaaaaaatgaaaaacatgaatacatcctgagttctgtagagcaggtcagcttttcatctttgttgtcgacataaactatagtttatctgtcctgatattgaatagcacatgagaaatgctgctggagatgcagccaaagaggccctgtgctgccatgcgatatgattcactccaagcctggcctcataaaccaggtcttatctgcttcattagcatgtgctttaaagggtattaaattgaaaaggaaattatgatagcattaaggcataaatcccaagttttgggccattgcagttgaagaccatgtcaataattatcaatgatgccttgatttctgtcatgctcaaatggctctcttgtctgtcgagtatgctgtgaagcctgctcctaacatctctccagctttccacagaggcagctattcacaataaaatgttatcaaaaggggggcaaaaataatttacatttttagttaacctttctcatttgtcattttggtagtgtggaagtcctctgtactcttgagaatgtattcctatcataaaataatttttgtcacatttgtgagccataatataagcctggttattgaagaaaatttaaaaaaaggaatagacagtattctccatcactccatcacaagtactgttaactgcagccatgtccaagacatcctgagtttgagattcatcatgatttaagtacctccccttggagacatttgattactgagcaaggctggagtgtgagcagtagggattcagaggatcagtctccttttgatctctgctactagtcagcaaacgtgttgcagcatgtttgccatcaaaatgcccttgaatgcaatcagagcatgccatcttttaattttgcccttacgtctcatttcagattttctaaacaaactctaacaccaaagggccatttcctgagcatatcactattgatgaagacccaataggaatgatgtcaattatcttctaaaacacttattaaggccttatcatatgttagacactacagcaaagcttcagctcactaagttcttgcagtgacccacaaggaagatggtccttatagatggagaagttggagactagagatattttaacatgtacagaatcacaaagcaaggaactaatgggtcctgaattttaccctggatttgtctccaaagatgaggaatcactgtgttaattgtctctctgctctccttgtatgggctcttaacaagcgtagtgatagaaacaatggtacttacagaaacagctactacttatgtgagtgatttctcctatctgagtcttagtctgtgtgttttattttaagccatttgaacttgagagcaactcaaagagctgggtcttatgttagggttgtagaaaatgaagtatgctaaaacaggtcacagagacccaaggcaacacacacacacacacacacacacacacacacacacacacacacacacacacacacacacatatatatatatatatatatatatatatatatatatatatataatatgatagaaaatcatccaatcttgattctgtgaagaaagtaacattttattttattctcatcaccatcatcatcatcatcatcatcatcatcatcatcatcattatttaattctggggattgactccagaaccctgaatgcactagcaagtgttctaactctaaactacactccagcccaggaaatagaaattttaatatttacttgtgagattggaaacttgtccataagttctggtataactaagacaaccatgtaagagctttatttcttctatatttttctgtgcatagagcctcccccaccaaataaagtctaatttaagaaaattttatgccagtctttttttttttagaaatagcatagggacctgggataacggaagaattttatgtttggttccaagtaaaatgagattaagttgaaaactcatgtgagagtctcccatgcagagtccccacgactgccttgtgttccctggacaaagtccagagtcacttatgcttttgataaacttaatagtcttgtttggaaaatgggtcaggaatcttttatgcaaaaaaatgtagagatgtagtatttgcttgccttagggatatgagcaggacacaccatataaccctaagaacaacaaatctttttgatctcagaataaagggagaggtggagttagtctatctttctgtcttttcagtctatgtactgagcatgtcttttgattcagggatttctctctaatccttacagctctctgtagaagatcttctttttttaagaaactgggattcatagagaattaaatatttacaaagctttttcataagatatgattatatatgcatatatatattaggaaatgataataaggattatgatctattaaaatggatgtctttagcttatttttatttcattctatttcactgccttcctgtggtaggtaatgggagtgacaatactgggtaataaggattcctgccctttgaagactcaatacatctcagagatatgtgtgcatccgtgtttacttctgccttattaatgatagccaataaatgactagcctagacacccatcaacagatgaatcaataaagtaaatgtggtgcatacacaaagtgggattttttcaaacacaaagaaaaatgaaatcatgacacttggaacatggttggacataaaaatcatcatgttaaatgaaataagccatattcagaaagacatttgtagaaatcagagttggtgcacctttggctttgttgttttgctgggttgtcctggtgatctggggtctttgctaccacacgacttcattttatgtatatggggtatgcatgactggcctcagaagatggtgttggatctcccagaactggaattccagatggctaagaaccgccatgtgggttgtggtcactgaacaccagtcctctggaagagcagtccatgctcttaaccactgagatacccctctagcattccatataacttttaagactgtttttctatttctgtgaagaatggcgttggaattttgttgaggattgcagagaatctgtagactgcttttggtactataaccatctccataatattaattcttctagtctatgatcatggaaggtccttgatactgcaccctgctgccacccagccagaagtggcacagccagggaatggaggtttgttatggtacatctcctgcctcatcagttccaaagcattatcattatttcttttttatcactctttaaaacacttgttaaaagacaaagttataattccatttaaagatttcttggttttattttacaatcctagaatccagccacacttcattccataaactagaataagctttccatggaatgagtaaaagaaaatagttttgaaaatataatgaaaaacaaacaaataacaaagcaaccagaaactaaggattaaaaaaaaagtggacctgtcatttcaaagttacttccctggtgaaaaggagagacaataagaaaattgaccagttaacttcaggtccagttttcataggattaaatcagggaacttggggatggcgagatggctcagtgtttaaggcactggctgctctcccagatgggggttttatcaccagcatccacatggtggctcacagccatttttgactctacttccaagtgacccaattccctcttctgtactctgtagacaccagccatttacatggtgtatagtcatacatgaaggaatacacacacacacacactcacacacacacacacacattttagatcagaaaatttcattattggccttgtttggacatgtatttattcctccatctgatagaaaaggtcatgtgacatgctaatttgggtttagtgacacggaattcgagtgaatccatgttgagttttagcccggtccatcagattctagttcaagagcctagtccaaaccctgacctgtagtttttgctcaacaagtcttatggacacagcattttttcccctatcaggcttggattctagaagccagcatccatattgcttctttattgtcctcttgggtgtgatgtttaaagtgctataaaaattttttcaatactcaagataatgttttaatgcacttatttaaaaaattcaaattttaatgcaaaattagatcgacaagatatccagatcttaaatgatgacacattctaacccaatacttgttgcacacccctacctcgccctttctctcaccctagtcctaaccctgtgaagaggatttacagccaattgaatgaatggatataaaatctgcatttggctcatgtgagccgaatgcaggattaacgatctagtgaaatgttcttagaactgaactcgataatgaatcctgtggttggattctttcctgctgtcagtctgtccatggctgttgactcagctgtaacagtcgtgtggaagcctggaagagcggccaacggccagctttcctaccagcctgtgctgcacacaagggcttttctcagcagctgcttaataaggaaaagcttgcctttggctggttctattctgaagcttctacagtttcttttcccttttcttatttttttccatccattttatgcttttggattttcccccctaaacaattgtaatacagcatcctttggtgttttcaggagtttggatttaggtccccctaaggatatcaaaatccagtgacaaggtattttcttgtaacttctgcatgtactgctgggtgcatgtctagatggctcatagcacttaacatggtgtgagtgctgctgacctgctgttgtactgcattgcttaggggaggatggcaaaacaggttccaacatgtttggtccagtcacagtttggttctggtgtatatttacaacccacagttggttggatctgcagatttggagctggcagatgggaagactggccacatttatttagaaattcaggacaataatatatagaaatatgtatgtacatcttcatagggtatgtctttctacctctccctacctatacacccttccaccaggggcagtaagtacaagcttaataaaatgtgattttaatagatcgtaggggatgaaagaaggtagggaaaaacaatggtttaagttttagaattaaatacaaagtcaccattatgttttatagtcaactttttatgggccttttgttttatagtaaaacagaaagatggcatgcctaatttgctttcacttaagttaggcccactttcgcctgctgttctcattgctaatgttgggtatactaaagacttagacaaatgtgggaacatagtttcaggtgttgttcacagttacatggaataaaacaaaaatccagggtccagatgtatagtgggcagcttttcctatcatcaaacaagctcagttccagaccggatcactgtcaccaatatccacctggttctgcctcccacaagctagggttaaagtgtgcacccccacactcagcataaagggggtagttttcataagaatgcctatttacctagacagggaaattttcaaaatgaaatgagctgttttcagcatgactagataactcattcactcagcaagtatctacaggatgtctatgtgcccattgctggagagttaacagtgaagaaaatacccaaatagccatctggttcacatggaacaggggacatggtgggtgcagtttaaggtgaacaactaagcaatcaacatgaggggactgcaagttaagtgtggtctgtgaataaacagactagctagtgagatcagaaaagaaagatggagggatagagaggtgaaatttaaaggggatttaaaacgtagtcatggcattaagtgagccaacagcatcacttacacagtgtatatgggaagcaaggaaaacagagaatgatttctaagcttggtatgctaacacaggcctgtaatcccggcattcagaaggcagggacagagggatgactccaatttccaggccactgtgtattacatagtggtttccaggcaattggggatacattacaagaccttgtcttagaaaaacaaaatatatcaaaaaaaaaaagatgatttccaagtgattgttggagcaactggatagataatggtaccactaacggagatggatagcaatggatggggaagatagctggggaaaggccaaaatagggaccagaaaattcaatagttctaatgtggatgggtaccatttgaacccctcgttagagagtaaaataagaaaattcagtataccctgcatatgggcttctgaaattcagatagaggtccaacaaaaagtcataaattggagattatcagcaggcaaatggtgttagctgcccaagtctggatgtgataagctataaaaaatggtacagacaggaaagagagagagggtggacaatcaagccgaaatttggaatagagatgaagagatgtcagctaggatactgagaagtggtggcctggtagagagaaggccacttgagagcaacagactgacttcaaaggagaagagagaatttccagatgggagagctgcagatttcagataagcccagacagcacaaagaaatttaaaatgagcacacagaaaaaaactgggggattgagcagcacacaggcttggtgatcttgaattgagtggaggagagcagctttgagactgatctttggccaagagagccatgttgcataacccctctatgaggccatttgagaacttttctctcttggacacagaaagacctatttcctaaacttttgaacagctagaaatgctggcattccctgggatgaacttaaccaatgtgtttggttacttatgctttttctaaagccaaggagtccagattcacttgtgggtattactttcaatgtgttgagaatcatggaatggtcagatgaccttggtgatcatgtagacgacctcttcgatctgtttgtaaggaaacaaaatcctataaaaagaagagggtttcttaaaacttcttttctgtgctttcagttgaacccagaaatttgtacacaccagtatacactttaccactgaactagacacctagtgtctagacaagttgaattataagagcatagtagaacccaggaatcttctgactgcatcacgtgttcaagtttcatgatccatagaaatcttttctaatatcatatcaaactgaataagcttggaaggtttggggttagttagtttgtttgtttgcttgtttgtttttggtaaaggcattgtatctctcaagacagatctgtcaataagctgattatttaggatatagaaagtgctgttgatgaagagcaaagacaaatgaccgaatagccaaaatgttcttcctcctcatcagaaggcatttctgtccatccccttgtccatttttagtgacagggatgggttttacccaatgttgaatttcaccattctagttgacttggtggaaggcactggttataaataggtcatataaggaccaaagacacagtcttggccaaaacaactcaaggcttgatatgcttattccattaattttgttcaagttttacacagtgtctgtttacctgactcatatgacacacagaaaatctagcttgaactccactgtaatcctgagagaggacttggttgagaatggatgagtatgtggggaccacatgtttgaagtcagtgtagtagagaactacagcactaaaaaggattacagatgttgtgggacactttcctttcagataataatcactactatcttaatcaaagcagctgccgggatcacaagaaaacctcaggattgggcctgttaaatttacctcatagaagtagaaggtgagggatgttctatgctcacctgagagtctatcttctattgtctgtgtcccttttgtagctctgtgtaaatgtgccccagctgcacatgatttctgggggtgccagattagagcaggaaaagtcatcaccatgatcatgtgagtcatttcagtaatacagctgcttaggggtcacccatgctcctttaagtaaccggatgaactcatggttcaccaaactgacatgagtggactcagtcctttcattgtcatcagtacccatatgaggtgaaatagatgtttgcttctacctccccaggaaagtttatacaatgccaggctgtacttaatgactgaatgcaaccgggacatatgcaaaacttagaatttctctaacaagtatcagggtctaggtttgagctgggatcagggggagaggtctttggtgttccaaactcctggtttgcccggttataaagcatttaggggtgggtggctcctgaccctttgatttgcccatttctctgaattgggtatgagcttagaatggcaaacctttgaagcctactgaaaaacttcatgtataaactgattaaatgtgaaagctgattgaacttttatacagatccactaggaaattatttctctgctacttgcctagctctagtttctattcaaattatttttcttctctaactcctctcctgtagatcaggaaaaccttaaatttaggttcatctttcttttttgtctatgtaggtagcatcttactcaacacttgggacaatgtacacatttgagaaatagttattatataaaatgtttttttttcaaatacaagaaaggtctagaatatgatgtttccggactaaatatttagactttttttccccttgattctttgaaagagggtttctttatatagtgctggctgtcttggaacttactatgtagaccaagctggccttgaacccagagatttgcctgcctctgccacccaagtgctgggattaagggcctgggccatcaccatcttcactcccccacacacatacacaatccctaccccccagataggcagctatttttgaaactaatgttacttgatcatcattatcttttaaaagtgaaaatgagaaagttacaataatatgaatggctgcttctggaatgtactttttgctcagcactttttaaaaatgacttcgtgtctgtccaatgtgtgtgtgtgtgtgtgtgtgtgtgtgtgtgtgtgtgtgtgtgtgtgtgtgtgctgtatacatactgtaaacatatatatgtatatataacaatacatatatgtatgtattgtcatattttttgtctgtttgtctctctgtctatgtaattatgtacacatgaggtacccgagaatgccaggcgaggacattgcatctcctggagttggagtcacaggtaaagctgagaatagtctatagtcttctgcaaaagaagctaaagctctgaactgttgagctgcttttgagataagaaaactgaggctcaggcaaactgtctaaaattcaaactttcaaatattacatctggggtctctacccagttgctttcattccaaagcctgtggtccttgcaacatgctagtgactaaatagaaaccaacagaataatagtattttactaaaaaggtcttcattgttttgctgagctattttggaataagtattatttatcttaaaaataaagtattttaaatacaaataaaatgtacccctcacatcattgttaacatgaaaaactattgttaataaaagtgactatacataggacatttaaaatattttaaggttatatacattaagttaaaagtcttttttctcccctacctgcttctgtaagtagccactacaactaatttcttatgtatgttctgaaattgtacttgaatttataagagagagagaaagagagagagagagagagagagagagagagaggagggagggagggagggaggggtatgtctgatgtgtctatgcctgtggataatccatttttgagaagagcttttaaaaatatttttttctttctttccaccccaggtgtcttcctaagtaacaagcatttcattacataactcctctaaattgaagaagcataaactgtttatgtggggggagggttgagcttccagagagaggccacttctgggcagatccctacagatgacaaatgacttgtataatggtcagtagaggaaagccagcctctatccaggaagaaactcagtccggtactttgtctatataacccatgctataaaacaaaaaacaaaaggcaagagaatactaagcttctataacaaaactaaaaacaactcatgaagagttattgggaaataatactatatgggaattaattaactaaactgtatgggaattaatactgaggcaaataaccaactctatttatgtgaaatataattagaataaattaagaaagcctcccttcatcaaatcacagagaagacatacctgagaaatgaccaacagtgaatacaagctgctctagcaaagtttgtgtatatcagctttccaaatggacgttgggtttgacataaaatacactagctgaaaactcatttgtatctctgaaacggtgtgtcatggtgagcattctaatacagtgagtagctttactctcattgatgggttttctcttttttgctgtcccagatgtctgggattgaaaacaaatgtctttcaacctaagactcctagcatctgtgcaaaagataaagacttttgatgaccactgatctatccatatgttaatatccgtagtttagggtactgttggatctattttacaccactgtactttaaggagctggcaattcaaagcacatctattttctggtcttttaaaaatcctaacaggaaaagcaattcaatcttaatcaaagagaagagactgagactcatccaagctcaagtcagagcctttcctggtattcatgtttaaaggccctgcaaaaaaagaaagtcacacagagttatgatgtcccattttgctaaaaagcatgtattcttcacccttgcctagttagtgctcttagacacagagtggggcatgttgtttcttaccagagtcacttccaagtctggcaggactttgtaggacccagaattctgacagtacagagtttaggaagcctggcttagttagggtttctattgctgcaacaaaatgccatgaccaaaaagcaagatgggaaggaaagggattgtttggcttagatttcagcattgctgtacatcactgaaagaagtcagaacaggaactcaaacagggcaggaacctggagccaggagctgatgcagaggccatggaggtttgctgcttactggcttgcttcccatggcttgttcagcccaccttcttattgaaccaaggaccaagagctcagggatggcaccacccaccatggactaggccctccccgattgttcactaatttagaaaattccttacagctgcatctcaaggaggcatttcctcagctgaggctccttcttctctgatggctctagcttgtgtcaagctgacacatgaaacaagccagtacacagctcctttccacatctcctcaccatcttattcctatctgttttcatcgattttagctggagtcaaacatttttgtttttccaatctaatccatgaaatgttcaagtggtaacataggacctgggtgtataacagtgaacaagacaaactcctacactcaaggaacttacagccgaatacaggggagacaaaaataagcaaacatgagtatataggttgagtattctttctccaaaatgcatagtgtggcagctaatgctcagtttcaaattgactgggtctagaatcataggggagatgggctgcaggcatgtctgggggtggggagaataccttgattacattaactaatacaggaagatttatcttaattggggatggtactattctttgggcaaggagggagggagctgaaagctagcttgcatcattgttctcagttcctgtttatagatgcaatgtgattggctgcttcaagccttgatgccttggcttctccaccatcatggctggtaccctgacctgccagctagaatcaactctttctcctttaaattgtcagagtgttttgtcacaacaagaaaagaaactaagacatttgaggagagaaatgtttcatcaagtattttcatacacataatgagaaagctgggagataggatcaaaggctaaacatgaaatccatttatgttccttggtacattttatacatatagcctgaaggtaatgccataatatgtctttagcatgcccgtgactattttttaaacacatacctctcactgtaactgtccatccaggccttgaaatcatggatgcatgtgatcttttgcctctacttcctgagtagctgggactgtgtgcatgtttcaccatacctgacccatacctatgctttgactatgactcatcctgaggccaggtatggaattttccacttgtggcaacatgtaattattcataagttttggatttgataccatattggatttcatattggggatgcttaacctgcatcaaagatatcaccgtaggagagtaggtaaggaggtagggaggggcaatcttggaaggcctctgtcaccgctgagcagataccctgtgaagtaagggaggctgtgtgtctctttctggggtctaagtgctaatagcagagtatgaaagaaactcaaaatccctgagggtggagtatgcttggggtgtgtgaagcatatctagaagatcgtgagaatatggggtgaaggcaaccagctcacagcatttaaacactgacaaggtgatcttgaacagaggaaggatggcctgatttcctttgaaagggtatggtgactagtactgcacactgtaagtgagccagcggacaaccagaggatataattgcacaagaggtcatggtggcttaggaagaactggctacacaattttacgtttgattgttaagttcttcacgctcaagagcacctggctttgctcatcgagcctggaagttgatgaagagcttttctacaagtcacatgttggtgcctaaattgtttgctgtgctgaaagtcaatactagcaatggcttgggggagcagcagaggtgggaaggtaatagtctacttgggggtatatttgaaggataaagccagaaaaattgctagtacaatattgaaaattaataactccagtaagtctctgctgtcaagggtcatgcagaccctaggaggattactgggtaggaaacttagaagagcgtgcttgagggtcaatccacaaaggatgggtgttggaggacaggactgggtaaggggacactgggctgagatgtgacctcaatgaaggctactgtctgcttcatagacattgtggcactgggagaatccttaaccttgttccttagttgagacaagggagccaagcctctcaattccttcatttcatatccccccacctccaggtaaagcatgtgacctcagtcatgccagccccattcaccaatgacagtctccatcaaactatcgggaggagggggtcctaccttccagcaaccatctgagcatctggcagggtgggggagagtctctcattctaaaggacatgtggtgatgtcttacagtattccgtgtcccaatctatagcacacatacacgttcctttctcctgattatccagatacaatcaccagtgactttctagtcagttttcagtgagacggaatatattctccttacagggtttacaacaataataaaagtatccatggccccaccctcaataagttttcagtgttcaagagcaaaaactacgcatacagcaaaaaagtactagactcatatattgatctggcatggaccttcccgtctgtcattggctggtacagtctttaaaggagttttgcacccgaggctaagttttggattctccaacacaggtggaagaataaagtaggatgtgcagctcttcaggataacttaagaaaatcacttcagactcccattgtttgacaatagcaccacagtatgatgttgccatggttacagttcctcattgggatgctaggtcagagaatcagattcacacagcagctatgtatgttccatccagacctacatgtgctgaatgggatgctactgcatggggcacttgtccagtgtctgtaaactgaggggagccctgctctgtgtacccccatgaagaacgctctacggcgcatggcacaattaaactggcaggagcaagtgcaggttataaactgtaaagcacaatgctatttgaggcgctcataagacttacagagggaatccatagctgagttaagcttgacagctttggcgtcttagagtatgagcgactataaaagtaagggaaatatttattttacttaagttgtgaattaaggcaaaggctatatttgtgcttattctttacacacacacactatttaaaaggcagaataatagataacaactgtggatttagggcagcctgtgcttagagaccacagcctggaactggcattaagtgaaaccgcttttattggacatcttttctctagggttagggagcattggttgggcagcataatgtgacaaaggaggcagagtccttccctccagagataaaaagtcaggatggcacaagaggcagacctgcaaatctctggaccaagtgtgatagtataacacaggaaaatacaaaggtcccatgtgatccaaagaatgcaagacttttgctaggagagggagggcagcagaaaagagcttttaaagagacagaattgacagtgtgcacaaatgataggactccatctcttttaagtaagcaagccggtatgaggcagaggcatatggatggctacaaaactcattttggtggaatggttccctgggactggagcaaaggttaacagtagaagagttattgtagctaatattaaaaactgacctaagagcagtaagggtgtttcttcagagaactgtcacagcagtcaggtgcattacatagcattgtccttgttggatgagcaactggggacagacagaggctgagtaagtgaccttatcagctagcattttttgactgagatgaaacctaaaacaaatgtcattcaagagtgcaaactttaaagcactgtgctgtgctgtacctcagggacctctgagaagaaacactaaggtgagtcttctcttttggacttactgtaaaggtgttaggggaaaggtgtaagtgtgtccttaattcattagacaccagagttcctgaaaattggtatgagggctagcggtggaacaatagttattccaggaagtacatttcaaagttatatgtttagttgaacatgtattaatgaaactgtatttagtaaattgaaacctggatctgctggaaatgattgcttagaatgttactgtagattttttaagtgtgtcaaagactttattaaagttgctcatgaaagaaaaaggaagttttagtacagttggttcttaacatggtaatccatgtagctaatagagtcatggggcctccaaaggaggcattggttgccaatagagctgtgaaagccataacggatccatagaaacacaatggtgtcataaaatcacaacagagtcagaatctcaatagagccatgcaaatgctgataacatggtgtaaccatgacggcttcagaatcatgggaccctggtgtagtccgtgtatcatgtcagctccatgaaactccaatgcatctgaggaaccccaatggaaccatgacagagcaatggtgatgctacagaaggagatacaggtttaaaaaaatacccaaagttctccttccattccactctcccaactttgccctggagtgcctctcattggttgagtcctgcctctggaatgcagccctatagtgcagagcagaaaatgggaaacaacaaaaccagcactggagtccagcactgatctacttgggaagtaactacacgggagccagttgagtaagggtgtaggaagtgcattctagaggcatttgcagaagtggggtagggttgcctattgcctgagggacagaacctgcatgaagaattgtgcatgaaacagaaagaagctgaactgaacccatgattgatagctgcagctcatctatggctgttccagctcatatgtggcatcccatttccattggctccctcccatgccatctcacttccaaccacaccagaaggttttattcttctggtccctgttttgtttacttgtagctattgttttatgggtccatttaacgagacatatattcatggtgattacatttatgataactctggatggtttttttttttctgtttttttcaattgtagcaaaatctatgtggttattacctccatatgctttctctgatcttgaagctgggactcgtcattataaacatcacataggcagtagggtcagcagtgaaatgtgactatacagtcttctatcatctgatatttatttcaaagatggtacttgacaagtctttaaatgaaaaactaccttaagccatgtatggtggcttatacctttaatctcaaccctcaagaggctgaggcaagaagacttctaggagtttaagtcttgcctgggctacgtagagagagttccaagccaggctgggctatagactatctcaaaacaacaacaacaacaaaccacaaccatactttattccttagtgaatagcacaggctaaacaacactccaaggtatttttgtttttttttaatcaattttatttaaataaaaagcaatcccattttacatcccagttccctctccctcccaacctcccactctccttaccatctccccatccactcctcagagatagtgaggccacccatgggggttcatcaaagtgtgtcacatcatttggggcaggactcaaggtattgttttaagagagaaaattgcaaacattttcaactcctaaaatgtcaaataatgagtatgatactgaatatttggcactggccttgagccaccttggtgtacctggagagacagtgagtgctttgatttctggaacctcatgaccttgaagagttccagggaaatctgtaaacaaatttcaaccagaaacatttgttcttttggttgcactccccttggttcctgggacaccactttcatgtcagcatgatcttggctaactaagaatttatccttcttgacattttcctccactcagaatagctgctttaattgcctttttgcaaccctgcccaattgctctgacatccctgtctcaggaagagatgattgcaaaagtctcaagcaggactttggaaattgtgcggggtacatgaggactggttggcagagcacatttccattatgcattattaaaacctagcacacagcatgggagattaccaatagctaaatccttccctggccagtgatacctggatttattgcactttctgagaaacactcacacacaaaatgagcatatgcctggctgctagtggaaggacaaatagcaaggtccaaccccacaccctggaagagtgtccctgaacatttaccacctagatcagattaaacgacaacaaatcccttacaagattatggacttggatatatgtaacagtaattgccacccaggtattgctttatggtggagcatgattttttttctttttgagattataatataattacatcatttatctcttccctttcctcactccaaaccctcatatatacccttcttttttctctatcaaattcctggtctccttttttcattaattgtcattatgtgcatgtatgagtatacatatatattcctaaatataacctgctcaatacatataatgtaacttgtatgtatgttttcagggaggaccatttggtattggataaccagttagtgtgatcttccttagaaagactatttctcctgctctcagcagccttagttgcctgtagttctttgtgtagagttgaagtctcctggcctttccactcatccactctggcttgtctattgttgttggccttgtccagctcatgtttaagcagtcatgttggtgagactttttggttgtagcttctgccattaccaggggacacagttttacagcaaacttcctgatcctctggctcttaaggtctttctaactcctcttccacagtgttccctaaactttggtgccagagttggttttagatgtattcattggaactgagctttacagttctgaattttgatcggttgtggttttctgtaatgatctccatctgttgcaaggagaagtttccttgatgaggggcaaggactacacttatctgtgagcataaagacaaatatttagaatgtagttagaattgtgctggtttaataaactggatgttgtatgctcttctccaaaatctatgacttctcgagctctaggtttccagcaccaggtgtgatttccctcttgttgagcaaatcttaagttctctttggaagatgaatggtaagaggcatgaagttgagacatcagttctttaaaaaagtaaaacattgaaagtttggtataacttttgagtgttaagagacatccaaagacttgagtttctggaactagaaagctgagcatataaactgtttaataacctcctactgagtgattgaataatttgaggtcttattataacataattcatctacagtgtgatctgtgacttctaacttaaatagtaaattatattcaagctccagaagatttcttggccgtgtgtgtgtgtgtgtgtgtgtgtgtgtgtgtgtgtgtgtgtgtgtgttacagatccttgactaataaatttatcctattcttcattttcctgttttaaaatactacattttgtctttttttgttgagagttttttgtttgtttgattgattaattgattgatttttttgtttttgtttgggttgtctatacccagttgcccccttcttaagtaaatattctgaggcttacgtatataaggtttattaagatcatttcaataaatagtgatgttatgtggatggctttcaaaaaaacatatgaccaatcaaataacttaaaattaatagcctcttaattgtagtaaaaatccaaaatatagaactctataagggaattttaaaagacctaatataattgctcaacaaacagtgctttctgtaaggtctggaggagagtactagtatacctgaagtctcttattagagttgctttgttagaaataggttgggtaatgctgggttatacatgctgacttcagtaacagcaagccactgtgagatgtgggagaaccagcactcgattgaactaagctgtcctgatttccattcctgagccatacaactccctattggcaccatcctacattcaaggggtcctagaacaaactaactactctatttttctccattcaagtagaaatgattaaccaagcaacaatgagttataagtccacagcttttctttttcaggtccttaaatgctgtaacatcagaatgactgttggataatatccacttctctgagctgagtgctgtttacctcactctattgtctcccaggatgtttgtgcaattaacaaagattgtgaagctagaacacgtttttgtaaacttagtggtccttatagaagtgagcgatactttctactataacttaccaataaaataaaaccatagaaagaacttttactatgtagccgtcaggtaaattatttttggtcagctctggtggtaagcatttccatataagaatttgggtatgagcaagaagaatcaaataatatggaatcagcaattctagaaaataaaccaaagtgataatttaaaaactaagaagaagatgggggctgagggagagttcctggagttagtcgggatctgttatcatagacagagaggctgagggaaggaacaaacatgaaattgacaattctctttaatttaccaaaaagttcctttgagtacatttcagagtaaatgtgtcctttgtaaagcagggcagctaaatttggaaatacaaattttacatgatcttaagagccctcatttcaactattttaggggctactcaagattaaaacctagatagaacatattgaagatcagctgcccatatagtgggtgccatcaatactatcaataataaaaagacaaatattgaatgtttctctgtatggtggagtcccagaacctgagtgtctgatggaaggagttaaagcctagtctggtttactgagtccctgtcttggaacaaaaaccaggagaggaaaataaagtatcttttcttttggttgggaactaataggaggggaagggatgagaaagatgaggatagctgtatatacagaaaatatactcacagatcactgtgtatttgcatgctctcagttagccaagcataataagattaaatttaaaagagaatttggttctcaatgatcacagtcccatcattatatgagctttcttctgactagacctaactttccaaggatcagatttctggttctagctagggcctcttcaagatttatggtcatcctcaattctagtcccttgctgagttgtctttatgattctgcttacactagactattagtggcagcttcatgcttctcaaacatgttctaaaagcagctagggttcatttggtcctcactgcaaacatataagctgtagcagctatctctacttttctctgagatacttgaaggatgaaggcatgtgcaggacccactgtccttgctctggtaagtctaccttgggtttgcacctagccaatgagagtttttccccatcaggccatgttgtctttctaatctcaatagcgacatccccaaagtcttgattccgccgcagattaccacacatttgtttccatctctgccgtaataaaacataagcctaaggaaggcatagaccaaaatgaaaacatgtttagctcccatttaagatgcaaccaagactgtgtgaggaaatgagaaatggattgtcagtgagttaagctctcatttcctaggttaagcatttacaaatatgtgtctttaaaggagaaggtttttacttctgaccagccaagtgtgtttaaatctgtggtgcttgtacatcttgtacctgagaagcactggatatttgcaataaagtgtcgcacaaaatgaaacagtaacaagaaacccacaaaataaagcaaagcccgaggggaagcctccctatctaggcaagatgaaattctctccagaatggaccaactcctccaggtgttgacagggtactttgccaccagtgtgatatttgcagctggaaagcatcttttaggactattgaagggggtcattgaactttggcctttctccaaaggtttggaaagaccaattggaaaaagccacactattctgcaatgatttatagacagtaagttagcagctctcaaatgatgtgaattatatgaaggatgctagcagatttcaaagactgactatcccattttatgctactttgctcaagtgcattttactttgacattattttttaaggttcctggcagctttgtggccagcaagtaagttgatgttatagttccagaaactcagatgatggccacttgtatttttttagcaagtaaattgtcattgtcgtcttcttcttcttcttcttcttcttcttcttcttcttcttcttcttcttcttcttcttcttcttcttcttcttcttcttcctcctcctcctcctcctcctcctcctcctcctcctcctcatcctcctctttctgctcctcctccttctatttcttcttcattttcttctcctccttccttcttctgtatctcctcctcctcttcttcctcctccttttccttctctgttctgaggatggaactcaggaccttaggccttgcatgtggcagaggagtattctgtcaccaagattcagtcccagtgcagtaaatatgttttaataaatttgtatgtgtttgctttttagccaatgttattgtacagttgagagactccggttctacaaacataactctcataagcactagaaacaaaggaatcatgtaacttatactattatgctgttccctttactgtagtagtcttcaagggcactgtggttgctctgtgctgagcctgtatggaacaggaggggttcatttatgattccagtataactgtgaatcccatctcacgaagatggtactgagaatagagaggtttggctttccctggtctgcccacggtctccatcttccaatccagtcctgtggtatgttgctctgctctgtcctgcactcatctgccaatgactgttatcagttcaatgtgaatggaaaaaactctgagcagatgctgaaagctcagtcattacagttatgtttactaaactcagatgatcatgggtcttttggagaatctgataaagacaaaacaaaacaaaaaacaacaacaaacaagctgttcttccctgtaaagtattcaggtgtatcttagcttgtcatgaacatctaaaatcaatacctgggctcaagaataataagcccaagcttattacctttgtatcagtaaggttatctatgatggatactatctcttgtataaaccgaaggcatgactgctccaaggtgtggctaagtaggaggatttgttgtagatacggtctacagcaggaacagaaagtagtagactgagcatggccagaagactggtcttgaccataagaggagagatggggagagaaagagatgaagaaaaagaaagtggaggcaaggagaccaagagaaaggggcaaaaagagaacatagaaagagggctaagggaagaagatgaaagagagacagcatggttaacatagctgggagaggaaagcccacaagctggagaagtttagggtaaggggcagggagggtgaggagagcgagaatgttagcatgaactctgaaatgtataacaggtatttttgatactgagtgagcctagagaccagcatatgcttgggtatgctaataaacatcacagagagccatttgtccctttggccagtgataagagaattggctccttcattagaactggctccattggaatgggtgccaaactttggggagtggagtttcctttgaatctgatacttctaactcacttgccatttgtattagaacatattgtttttatgtaataaaatacccaaggctggatccagctcacagttttagaggttgaaaaatccaatagtatccatccatacaacttcagtagggaatttctggttacatcacaacatggtagatagtatgatggtaagagcacataacagggagagagcagtcgcatggtaaaaagggaaatacaggatattagaagccaggttaactctataacaaccctcacatgagaaccaacccagatcccatgagaactatttcaatgctgatatgcaaggctgacccctgagcacatgacaatgcagttaaacaggtcatcaccatctggaaattattaataaatccattttagtatgttttataactaaagcctaaggggtcatggaacacatgtcagaggattgcagcctcggcccatgaaagggtctgtgtcctttctttttcacctccctagagcctgttcttcactattggctagtggccctcaacctcatggatggaccttcccattttcctcttcttcatccctatcattgccctgagcacatggtctcaggaagggccagtgtcagacaagcatatcccatagcatcttagagcagggtgtagtgatgatggtacccatcctgagatgccagcggcaccaacaagcaaagtggacaacttactaggatgagcagattactcagcttcgtcgtagctgcctagcatgtttctattcacagacatttcagtagcctcaaatgtcactggactgcagggagtttgggaagcctgactacagggtgagttggtgcctagcttgacttccagtcacccctaggtcatcaaacaaaggccaggtatttgtcagcaaaatgacccaacagttctgtagacagttgccctgatttacaccaacataagggaactttatttgcctgatgcacaagtgtatatagagcacagacagaggggaaccatcatgacaactcaagagagggaccccagaagaaatgcaaatgctttataattagtaactggaataacatctttttccagctctttcaaaagaggaactctgcattttcctttggacagtgtccctcaaattatacagcccatccttctgtgtcttacaggccagccacacaatgtaacaaaggaagctgagaaaagtagtccttatgttaggtgctaatggccagacaaaagtcgggagttctgttgctatgaaagatggagataggattgccatagaagatgaagacagtgttgccatggaagatggagaaagtgggatactgaagtagacagctagtagtttattccatataagaaagtgtttataaaataattaccacagaccaggcattattgacagtgtttatttttttattttttatttgaattagaaacaagattgttttacatgacaatcccagttcccttctccctcccatcctcccctacccccccccaactaaaaccctatctatcatattatcctttctgctccccctggatggtgaggccttccatagggtatcatcagagtctatcgtatcctttgggatagggcctaggcccacccccgtgtattgacatttattattgtcattattattattattattattattattattattattattattgtcatttatttaattctaaaatcaacagtcttgctatctccacttactcaggaagctgaggccagagaattacaatttcaaggtgtgactaagatgttgagtaaattcaaagccaacttaggaagaccttgtttcaaaactaaatgtaaaaagaggtcaaggtatatagttcaatgacagagcatctgcccagcactgtgagaccctgggttcaactcgtaggactgccaccacagagaaaaacaaaaaccaaaaaacaaaaaaacaaaaaaaccaacacaccaaaatgacaatgatgggttaaattgcacaagagcacatctagtcagggttggagtcaagtgcagcatggacttcaattccaggactccaaacccagagaaaccaccatctgtgcctcagcaggatgtcctcgctctcaaaataacagagaaacattgatcttgggatcacctttaccagagttgctgcagtatttgtttaaagtggaacttcctgggctctaagccagacactgagttgaaaagtctgaggacaaatcaccagtcactggaattctcatttgaaacaaatccctcaaggtgatttttataaactttgggaaatactgctgttgaattttaggatacagtaaacttccggggatgagtgttgtattagaggctgtgaagaagcaagccttcctatgaatgtattggagttgagacagtaacacatgttcataacatgttcactgcaaaaaagcaataaaataaaaaagaacatataaatagtgacaggaaagccaaagatttcaacacagtggtggaaaatttaacagtttccaccgcaattcgagatctgttggccatatgaccacctaaggtcaacatgctgcccaagataccccatgagttgggactggataacatctgtgggcagcacaggcagctctggccccactttgtaaaccccttgctggggtaggctgtgatcctgttcaccaattccatctttccctcacctgtaaggcttaggaattgacctgactgggaaaacaaggaataaagaaacaatagacctggatgtagaaaagctaagagcaggtgggcagtgtactccaatggagatgcaccagttgcatggagacgtggcccgtttattatatattctggcctgagctgaaagaggaggcaggctagctaatcctggtaggaggtctctgtagagaagcaggctcaggctgcagtcatcttggagcgggaagctgtggttggtactctgcacacactgtgaacatctgtattcagagcagagctatccccataaatctgaggcattgcagttcttgacatggccatgctcatgtcaacagtacacattcactcaggacttcatcttctccacatgttgaggggaacacctcaatgtgtcactttggagtgtgatatgtttgtgaaattgtattagctttttcatccttcctgactagaaaagttctgtctgagtcctggccaggagacaggcttttcattctttcgtgcactgggataccggagtctcttttcctgatctgcacgagattcctatcctcttggattcagatggctcacacctggcatactcatcctgacagggtattttctgtgcttggaagaccgctgacttacgacctttagtgggcacatgccagagttccaataacagattgttctcttaaaatagccctcccagcctttcatgttaagtcaggtctcaaggctcagagtccgttgctaaagcagaatgggcattttccattgcagattgtcatatatggctgtgaaggcccaggagggcagacctcaacagtcaccggttaagagaggaacacagagtttaggtcaagttttctttacttaaaaagcaagacctaagaactaaatggcctgctagcataataaaagactgtcatcctgtttggaggacctgggttaattctagatgtcttctgtctacagtggctccagaaatgagctagggaggccttgaagctatgttttcacaatcctctcgtaggagcaaagaaatgttggctgtgtcaacaaagttaaagaatagggctggaaaagcaactcatttgctagagtgcttccttagcaggtacaaagccctgggtttgatccccagcaccccatagaactaggcatgatggcctgagtctgtaattcaagcctcaggaggtggaagcaggactgccacaccacaatcttgaggcttgcctggtttacacagtgaattctagactagccatggctacataatgggaacttgactccataaacaaagcaaattaaaaaaaaccacagatgtggtactaatgtgtatcacattaaaaatagtctgacactctggtacatgcctgtaatcccagcactcaggaggatgaagctgcaggatcagaagttcaaggtcattattggctaataggaaggtaaagacacctgggttatatgagactctctctcaaaaaaaaagaaagtaaaagaaaaagaaggaaggaagggagggaggagggaggagggagggaaggagggagggagggaggaaggaaagaaagaaagaaagaaagaaagaaagaaagaaagaaagaaagaaagaaaaagctaatggactgtagagtttaaagtctccttctcagttccccaggccccacactggtactttaactcttctgacttcacaaaggctccgttatgtctaagatttctctacatcagagaactcttctgcaatggtggaaaggtatatatacttggctgtccagtacagtaaccactgactatcacaactccaccattgaaatgtggcaagcatggctggggaagaaaatgtttaatcatgtcatttcaaatagtttgagtagccacatgtagatggccagtggctgtaaagctctccagcgcttagaatgggtgccaggaattacaatttctgaattctgtcttcatgtccaattaagatgctagtgatgtgtatgctatatgactatattttattatttcataataaaagactgtcatcctgtttggggaacctgagttaattctgggttttctctgtctacagtggctccagaatgagagaaagggaggccttgaagatgtatttttgctatgactggccactcatatgactggccctcactcccctttggacacactgagaggtgtgggtcacttagacatcctcgatccttagtggactccaggaaacagagatgtggctatcaagcattcctagcctgtgctgacttttcatcaaaaaaaaaaaaaagtgttgatgaaaaaacagcaaacaaacaaacaaaaaaaaacaaaaacaacaaaacctcagctttcaccttaaagggaataagtgatagtttattctgaagctattttgagtgactgtggcctagaaacacatatatgagatacccaaataccatgttctagcatgggaggaagacgtttaataattttacagacggaagaaaatcataaatcaaggcaattttaaaatacattgacaggtatataagagagctggttacagcaagatagggaaagcttttctataggcctaagtgacaatctttagcttttgggttggtggaagctagtagtagattccaaaagatttttatctatagttacaggatgttagttctgactcagaagagggcaagaaagggctgactgttccaggtaggctaacactagcctgagatgagataattagcctctggacctgcaacattccaagccctccacagtactgcgattctaatcagtcaaccaatctctgcaggcacaatttctttccagagttctcacaaatgacagagaggcagttctggagggggaggctaacatgaaaataaacccatcaaagaagagctataaaatcacaacccaccccaaagccccaccccacaggtgagactcagctctttaattcaatttgatgttaattctactcattcctcctcagaatttttatttgaacacagaaaggaatttattgctgcagtgaggtttgtgtgactgtggtatcattgtaaaacaaacaaacaaacaaaaagaaagcctcagtcttattacaaaacagagttgtacagataatcatggtagtgtcttaaggtcaaatgttattttatatggtgcccttggtagccctaaattagactgataactctctcctacatccagtttcttctcttgggaatgttctcctccatattagttgtaaaggccttgtgtattttcttatactgctgattaatagacctttggtagttggagtcccttcttctgggtcctaccatgtcaacaaaagtctccattcttaggctactaggtctcatctctctatacccacccagaatcttcttttgttagaatctctactttgggagaggggtggaagtaagttgaatggcccatagccaacctaccctgccttgagtccagtaatctctgctctgaaaattgcctatctaataccttcagagttgaaacccaagtcaccatcttgcagaattagacttcactgcatctaccgatttagctggtatgttttgtggtcacagtacaaagtggatcactacctcctcgtttctgacatccacgcatgggtaataaaaccttgctttatttcactgcccccaaagcagaaggcttgagatgccacagagaggtgcccattggcctactcacccacccgaacaagcagagctactgaaaacacaaatcctgctggcacagttagttagttactcaggacacatggatgtgatgtggagacacagaagctctcaaaggcttcattcaaagaacaaactcataacacattccaagatgctataagaatgacattaagtattcctctctcccgctgtgtgagcacccagcagagtgccatgaatataaacagccctagagttgcagatcttattgtgttgttgatgagcacacatggttcttaagcacgcagtgtgggtggtctactggggggttatggatcaaagccacagggttttcttctttgctcagcctcggccagttatttctgagcacttgactaattgctcacgcactgcacagttaatggccctttctgagtttttgacaagaaaatggctacttgtttactctcagatgtcataataaatctgccctttacaaaccagagagccagcatggccacatggatgggtaagttaagagttcttccttggaaccctcactatataaccttgagggagttgtgaggcaggtgtgtctccagtctttgcccaacacaagctaagtgcacctgcccttgatcttgctgagtgggaagctgtgcagctgcagaagattaaaactgaagcaaactttgtccacaaacagagctccttcgtgctttgtgttttgtaatttggagcccatagcactttgtatatgcagaaacactttaaacttcacattcactgcaaagcagggtgtatttcctcagttccctgtttcgggcttgaatatcctgtagtgttttggggggttttctgtttgtttgggatttggtgtcctgttttttttttcctgcagggataaggattaaactgagcgcctcacacatgctaggtcagtactacaccataaataagttaggcttttagcagcctcactatttattatagtatttactttcaggagagagagaatgtgtgtgtgtgtgtgtgtgtgtgtgtgtgtgtgtgtgtgtgtggtaccgctggttattttaaatggccaaacttgtttttcataaaatatcaaagtgtgaggaaggcacagatgatgagttgatagccttctttgtcctgtttcacctccttgaaatgaccagtgttttccacaagtactcaatgttcatagacacatagactcttatttttataatttgtaaacatgtggctatatcccttatatgcagtagtgataaatacccatccacactcatgggtatggcatacttctaagttctatatatgatcaactcattctttttagtagttccccaaaatccataatatagtaataacctatttaataatttccctattactagggtctctttctccacttctcgccacagcctctatcccttcctctctcctgctcctcttattttattaagtgtcctcctctgtagcagtggagatttcacacagccagttgagttgcgagagcatttgggaggattgtttgtttacacagtccgttccctgggtttccatgtatcattgccaatctgtgacctggcggccaaaagctaaactgtagcttgtggccaaatgcaaacttaacatcgaggaatggaaaatcttgcaaagtttcttaatggtcaggaaggtttttcaattccaaaacaggtccagttcctattttataaaataaaaaatagtgtggcggcatctaaattttaaaactcatcttaagtatgtacaccacacacaaataaaaatatggtttttacatgacatgaaacaaagagagggtagggtttctggtgtggtaaatatcctgatgcaagtattcttccagcatgctgttcctgtggtgaacccgcatctcatggaggtggacctctgcctgtattttttctttctttctctttttaaatgcctggcataaagttgacaatggatgttagtttagccaaagggagatatgttttttgtcttgttttgctttaagggcatgcccaaggtctgtttgatgtggagaagaggtttataaggcagagaaaggcaaggatgagccaggcctagagcaaacctgtgagtagcaaagggcagaaaaactaggcaatgcagcctggcctgttgatggatactaatcagatcttgaggatgtttatcttgtgttaagagcaatggaaagccacaagagcactgctagaaaggaaggaacagccaactcgttgagtagagaattgcctgaagttttttgattgtgtggcactgtgattgatgaccaagaagggactgtcctgtcttggccctttcactggataagtttgttaagattttgtgtttatgtttgtggatgtgtgctcatgtgtggagaggccaatagttgacactggtatcttccttaatcatgcttcatggtatattttgagacatgatctgtgctgactgattttatgtcaacctgacataagctagaatcatcagagagggagcctcagcttctgcctctaggttcctaccctcatggttttttgttctgttgttgttttgttttgtttttataattaattttatttagaaacaatcgtattttacatatcaatcccccattccctctccctcccatcctcccatgcccctcacccactctccaaggatagtggagccttccatgagggatcataaaagtctgtcacatcatttgggggagggcctagaccctcctccgtgtgtctggactgcaatagtatccctccatagggaatgggctcccaaagttcattttttcactagggataaacactggctccacagttagaagtcccatagactgcccagccctcctaactggcacctacattcagaggaatgtttcggtccaatgctggttcctcagcttatgaccagggtccgtgtgctcccactaggtcaggtcagctgtttccataggtttctccagcacggtcttgactcctttgctcatcccccctccctctcagcaactggattctaggaatatctgccctcatgtttttaatgatgaactgttatatggaagtgtgagcaaaataaaccctttcttccctaagttacttttaatcatgatgcttcatcaaagcaataacctaattaggacaagggctcttcccgatgaatgttgggataactgatttaactagaatggctggctgtcaagtcccagggatactcctgtctccactccccgactccaaacttgaattacatggatgctgggatctgaattcagattctggtggttaaacatctttctccccagatcccttgatcttattcccattttcctatataccaaagcgcgttcatggcattagaaaatcccttgttttctaccttgaagatttgtccataatataggtgtgagagggctgtgcatgcacctaaatttccaacagatcaacaaagtccaaacacctttataaactatgaatcttctgtgttcatcctcccgagtctcttggtgccctcaagataacatgttcaaaggatatcgaaatttgtggatagactgagcaaattggaagtgtcatactgatcccaggagctagtctgtcccaattcagaaagacatttcaatatttcaatatttctttgaagatttgttatgactgagattccaggagagaatatccaaggactcatcccctccttatccatcactcactcctcctgtgctaggtgattttacctggtccaatctcacatccagtcacacttcctagctctggggaagtacaggagacaggcagggctgaggcccaaaggactggctaaatgcaaagggcacaaagtttacagagccctctgtcttccctcttgattcagacaatgaagcaccgggatataaagagccagaggagtaatggccactttaaatagctgtagttttgttcacaaaggctagggttggcagtagccttactgcagaaatctctaagaattacaagactttttaatgaagaaaaagaaaaaggagacaaaaaaaaaaaactattttcaaaatcccagtttaagtctacttgagtttcctaggaaaatctataattcacatatttaaatgctctcccatctaatggcccatgctttcttgctttggccccagtcatttctgatttggagcattactgactcatccctacaaagttatcgggcatttttttttcctccgtccacaaatcccaacttttgatctaagaattcagagaagcgtcttggcttctccacagctgaaaggaaaatcgagagctcttgcagccttaaatctagagaggtgtatgagtcacttagtccagctctgggactactcctggcaggactgctgttgaaggaccagtgaggaaacagggccaatcatggaagttatttttctttgaagaggccattccctgctcatccagacctgcaagcttaaaaagcaatttcctcgccctggtccactttcagctctcacaacacaatgccacctgcaaatcagaactttctaataaatgtgtgtcctcctttctccccaagaaggaatgttgaaaatgttaacaaaaaagggaaggaggaaaaccaggagaaggagaaaggagaagaggaagaggaagaagaaaaggagaagggggagacaaaggcacaatattctaggagacactatattcactaatgttcaatttcaacatttcttttagctcctaacttcttcaaaagattgtttacttgggctgggctgtgactcagtggccaagcatttatctagcatagatgaggccctgagcatcatacacccactaaaattctttagatttaccaaaggaatcataggccatttattcctgtgagtgaaatcagaaggacttcaggatagccattacaacaactttggaaaatggagagagaagtgttgttttcatgtatgagcactcgctttccatctgggcagctcctctgtatgttcattttgtatcctgggccatttagcagtatctcagcattcttatttcaaagtatttatctgtgggattttctcatttagtttcattagatgttatctgttttggaatggtttttctagaaagtagttcccatctcaggttttccttcttaactgtttcttactctacaatcaaaacagcaaaggaaaggactgtcaagggacacagtctgtcccctgagctcaaacaagtactgcttgctcagatccatctgtcctatcaaagggctctagtagtcacatgacagaagagaatagcaactgaagacaaggctgactgttgcccctacaactggattcctttctccatccttctccacgttttcccttttcctatacctttggcaccagccaaagccctacctatcagacccatggaggaaaatcaaagcaattgctctgaggcacctcaggtcttccttcattgatgtgggccagttcaatgacgttactgaggggatgcctcactcagccagacacacatacatgtgaaagtcacaatgagaagcatcttgtatccattccagtgcagatgagcaggctctgtctagctctaccatgctgtagtttaccagcttcaagaagtctaggaaaggacttggaccaaatggcttctcgggttttgtctaatgttaatatttcatgatcttaaatatgtccaactgggtaccgcttgtgttacagactccaatttggctcccacataccatggaaaccatgtgttggtgattctcagcttctttgctggcatgtggtttttgtaaagtgggacatttgtgctcttctgtacctgtcccacactgtcaggctggacagctccacttacaattttgcctcctcctaatgagtatatcctgcccaatgacccagcaggctctatgaaaagtgacctgacttcagattgccagaaaagcatatataaatctttaaacaactgttttgtttacagccatgtgtctaaggtctgaaacagtccctggcacagagtacttgctcaatgagtagtgctgttcaatgagtaaatgatcacaaccctcattctgcatgctggtggctgcatcctgtgctggccacatcacatgctgcaaagttaccaccactgattcttgcctctggtgccacgttgtcccatctgccctattctttccccacactgatcccattcaaaggtcttctttgagtaatgaccatgcactcagttcggttaataagccatttgaaatgagtctgattttcatgattttgctataatccactgacaccatcagcaaatgcagccaaaggacttggtgagtagaatattttcttgagctcaggagtctatgggcacctctaatgacaagcagcagatgggagctctctcctctgtgacagtgtctgaccagttctagggaaagcctgatggtcacatgaaaagtgtatacagggacttttgtaaaatgaacttcactatatttgaagtggcaataatgaaaacaaaacctgttctctgattctgtgttgcacatttttaatcccagtgcttggaaggaagatgaactgcaaggcttgagcctcaaaccaaagcaatatattaaatttgtttcatgatagaaactttcaacatctacaaatatgtattgttccatagcatacttcttcccatcaccacccagcaccaaagatccaggaaccatggaggatgacctgctttacagagtggagtcaggtcctaccatggaacactgaaggttctgaaggttccagggaccatgttattccatacaagggtggtggtagctgagaaggccaggactcagaagatgaaaaccttctttcttactgtgttggctttgtcaaagaacccattgcctggggagctatccaaggtgctgtccaaaactggtcttccctgaatctcttgtcctagcattgacctgtcagtctatcttaagcttctctctactgttcattttaattctaaagctatctgtgtcccccattttggattgtctcaggcttctactggattctaaatcatgagatatcttctggggcattcataaatttctatcaaccagcttttgatttcctcttatttcagggtctcactatgtagtcttagttggccctgaacttactatgtagaccaggctggcctgtagaggtctatctgcttctttatctcaagtattggaatgaaatgcatgtgcctggcctatctgtacctcatcttgactctgctccatctgcctggcaattgtcccctcttaaaattgatcatatgtctttaatgcaaggtttctgtacctatgccacgtatcagcaaaatggtagaaagcagaggcagaccagcaagagaagttaaatttcaaaaatatgatgctcttattttgtattattataaactgcctgaattacatattgtcactaaggtagttttctagtgaaaaaatacctaaatatgcagagactaaaaggaaaaaagaaaaacagttttcatacttgcattaatatcttttggcatgtttgttagagtgagttaagtagtcagctattgttggcaaggtgaatattaaaacatatgtttgatatatagacatcggtccttttgcaatttttacccaaaattaaactatgaaaattattaactatagcagttgatgccacagactggcaattggtgctattttttattttaagatacctctttttcttttaagatttggaacactaaattgatattcagtataatatttgcttgaaggtttgttttatgtaattataatgctttatattacaataaaatcttttatgtacattcataaaaattaccactataatatgtgcattgtccacgaggaaaagtaaatgtacattaacttaaaggacagttcataagtatgcgtgcctatctcccgggcttcatttataatgatcattctatctggagaaaggggaaaacagctgggagtgtcatgcccattatctcagcactggggagacaaagattgaaggctagcaacttctaagccaatctgggatagtctgtgttaggagttatcagaagaccctttctcaaatgaaggagagaagaggggaagagaggaggcaggaaaaagataggggagaggaggagaggtaagaggaaaggggaaggaagccttcgtgaggaatgcactctgtttccagtctactgaacactgccagaggtgtttgtgttggcacctaaggcggatttaatggctctgtggaatggtttttactctgtccccagccctcgtgtgaccaatgacctgcatctctaagacagttctcaagattagtgacacatatcatagccattaacatttttttctggctgtggaaagttaataaaccctcctgggactacattcttgaccttgtcttctgataagctcctaacatagagtacaaaatgttaaccaggcacgacattcctactggactccagctgagattggcttcaacttagactcagtaacaacagaactggaatggttagctaacccattttaacagcaggatgctgttactccatcagaactctctagacagcatggaataggatacagatcagaggagagccaatcacacagaatggaggtctatgaacctgatgtcccttgctgtcataccacttggggctcattctctgtccaagaactactgattgcccagttcctttattttccaaaaaggtaaaacaaggcttgaagatgttaacccactgctcaaactcacacagtaagtgtgggcaaaagaaagacaggagtctgggctcagaatcaccttccacagcccagtccacagcagttgtctattctcttcctgtttcctgtagttgaagcctgcatcatgcagacttccttattaacaaaactctgttttccttcaaatagaaacatctctaactcagactggtgtaaattaaatgaaaactttataatttaacgtaaatcaaaagcttggtgggatccggctttgagttcatgtaggggattaaagatgctatctggtttgagttccctctctttgtgtctctcatccctgtcttctgttttgctatctctatccttgggggaccttcctcatggactctagcaggtagaggcatccaaccttcacataactgatagttatagaaagaaatctgctttctcctagaaacttaaaacattcttcccacaggccacacttacctgagttggtcatatgattttattgcaattccagtcactatagcaaaatcgtttgataatttgacagcccagcttggttcacataaccatccttggatgagtacaattaggagacatgaagttgtaacagcaccatggcattgagagatggtaagaccctgaagttagtgtagacatgcaggaaactcaataaaataggttggtagaatagtattataatgacttggcagacattcatcatactaaatattcatgtacattcctatgaggtcatgttataatccaagtagtaacaccaggaacatgaaacttcctacttgattcagtactgcaagcaagcacccccatcatattaattcattaaaagagttcagattttatatgtgtttggacttttgcatcttacaaaagtatctttgtattttaaaagctggataaccatttggtttacatacttatggggattggcaagagaattcaaaaaattaaaaataacattgatcttggacaaatgatgaactaaagaccattataatgcccacaagaaaattagattaactgctttaataagaattttggtaattaatactaaaggacttactacccaatggcaaaatagatcaggaataccacataattgagaatatcaattatcagtggcttttatacctgtaaaaactgttctgctccacatagcaaggagaagtcacatgataccttctgtaaaatgccattttgatctattggaagatccccatcagtctgatgaatgctaaaattgatttggatagtagaaaaatgttcctatgttttaccactagttaaaaaaaaaggtgatacaatttcaagaaggaacatttggtaccacttaaccaaagtttaaaaaaaaaactctatttcctttcattctgtaatgccagttctagagctttctcccatagctgtacatactttgaagtctgtgcttagtcataaatagaggattatcaccatattgcttttaaaagcaaatgatatggggatatgttcaacactatgacaacaattagttgaatatgatgcttctaattagagggaaggctatgcaagagttatatatatatatatatatatatatattatatatatatatatatatatatatataatataggatagaactccatggtagagctacacatatcatacctcaattctgggacaattttttctgtgaagttttagattctagagtcactgtaggtgagtgaactgaacctatgatcctttctcctctcctttctagctctccgtgatgaagccttagggtgtgagtcttctggcacagccttgaaccaagtcaaggcaggtccaggagatagaatgtgtctggatttgatcttcagcaaagacagtaaatagatgtatttataaatgatagatggaggacagataaatagaatctctaaagtatattcaaagaaaaagggtattttaaccacttatatgaaaatttaagatctatatcttaactatatcttaactaaatatatagttgtattagctacttctctattgctatttaaaaaacccacttgcttgggcatgctagcaggagtagtaatctcagggcttatatcttgatctgaaatcagagagaatgactagaaatggtggaaaccttttagacacccaaagcccacctccagggacatacttcctccaacaagaccatgtcttcgaaaactacccaaacaaccccatcagatggggagcaagtattcaaacttctgagcctgtgggaggggggatagactcattcactacagaggttccatgtatttgtgtatataaataaagcacctctgacataataacctaggatttcaggatatcaggcctagttggttgtcttatgttttttaaattttgtattaattttaaaaaaataataagtcatcaaatccatatatagtgtggttcaggagccctgggagataccactcctgtcattctttacacacaggcatgatgcgcatatgtgcacacatacacacacacacacacacacacacacacacacacacacacacacacacacacacggccttggctttttccagaaaaagaatcaggctaggaccaaaggttgcaggatgccctgttaaatttgaattgtaaataagcaacaaacagttttctaaggtcagtatgtgccgtacaatatttagaacacgcgtcagtagttccaactgctctgtctggccatctgaaggaatctggagcccactgctcattaggcagagttcagtgtccaagccaggcttctgcaatctgtcaaatgaagaacaaaagtgtccagctttttcatggggttgatgggaggttcaggccagcttcagtgatttgtaaatagttaagtctctaagactgaggaagaattttttccgtcagtgttttggccttgaaattcaaaccacttactgaaacctgatttcttctacttctattttggtttcttagaagacttagatacagatacccacatatttctctccataaaaagcaagcatttgcttctaaaatatgtaataggccatataaaatatagcaagaccttcatttttcatggtcagtttcccttgtactgaaatatataaagggatctactatttaatgaatttgtcacatgcttatcaaacacctatcatgtgccacaccttgaagctagagatgactaaaacagatacagttgaccatatcaaaatgcatagtgtggttgagatctggctggggaaacaaagggttaaaaagaacacttctcccactgtgctccgtcagagtgtcagaatcaccttcccaatatacttgccaaactggcagtgactccagttacccattgtgcttggcatcatcgttgttcacatgtgttttgtttttctttatttcattgttttctttttgaggcagggtccctctagagagctcaggttgaccttgaattcatgatctccctgactcagtctccccactgctgggattagagggacatgacaccaggcccagctcttttatgtcaatatttccatggagtatcttctagaaactattccaagagctggtgtctaagaatgcaaacattcttattcagtggaggccttttttacttgctcaagctttgtaaagctgtgttccctttccaacagcctcatgacctttccctgtgggttcatcacttggtttcctgttggtagttgctaaggtaaacttctcttccagaactgccactgaggtcagcggggtttaaaccacaccctgcatagccctaaagaaaagtgcagacagacatctgggtggcagtttccagcactggccactgtttacattggagattgctgctggtgatctccttaagcactcataacattctgtaatcttttgatacagcttttgcagggttagctacgatgagaagtttccctgatgtcaggggggaatgacaatgtccttggagacagctgtgcagtcctgctctgtcattgctccatggagtcctgatatctgtgtattgtaatgcctccaaactgggagtttgataaaaaaaaccattgctctctttaatctggaatgtcacatgctggaaagctttctgaatgcttcccacaagctctacgttccggcaaggcaaagaattgctcagttttacacttctttgcatatctcaatgtagcagggttaatgtttcaaaaaatattaacagtaaggacatatgttaaagtagtttagtgtggcatgagtcactagtgaagatactagctgccaccaaatgtcatatttcctgaagtgaaatttagaaataaaggttagtgagaaattattaagaaatttgaaactaatgagaaatccccatagtgaaaggaattttaacatgtccatataaaaccaataatggggaaaacctactgtcagaagggagtttactcatttatttaaaagtagagaatacaaacctgctaatagccaagcagatatgctgcatgccctaaaatgtggaaagtcctaataaggatggtagatgaggaaataggcaaatataaatggagctaatggatgctaaaagaacttagaagagacatccaataatgtaggcggaggttagcaaagactgtctggaaaccgaagtatacaacaagatcatgatgcacagttaaagctgtacattgcatggctatccccaatgctgctgtcaaaaatggagttcagtgaagtgtccatgaccactgcgaagtcctttccgtatagagagagggtacaccctgctgtagccctgtgggcagggttaaaaaggaaatgtgtacactgtcattttgttttgctctttaaacacaggttccccttttctcctgatgcaaaactgcacttgaaattccccacatgagagcactttgctatgctagactttgttctgggaggagtttcttagcaatgggggcccaaacagagctgcaaagtgtggtgacgccttctcaattacagaccactttgcccatcacactttagatgtgggctgcctgtaaagaggcagtacaaaccaacatcctcagaatgttgatttctctagagagttgggtctaagttaatacctcttaaatcacattctcggcacaaaaataaacctagagccaaagggtttgtgtactttcactgactccgaataagagtctctgggacacatatcattattaagggacctcggatggcagcaatagagcagagaagccattcttattgaaaacattccaggaagaagtggtaaagcaatgaaagccctatggagtgacccctgctgtttaacaggggccgggaggcctagtgggctgatttttatcacatagcatgaagtaatacattgtctagctgctgagtccaaatcctttgtggaaatgaactcctccgaagacttatcctgataccttctccttgatgtcagggagtaaatacagcatccttgtacaacaggctgaaatctggggatgctgccagggatggccttttgtagagtggctctgtaacccctcatgcccttgctgccacaactccagcactatttacagggatatttggggtgaggagagcttcagaaccagagacttaggagtgtctctgacaaccaaaatgcagctggaaatatcattggttgtatccagtgagttaatgatttgtcaacatctttccattgtgaggaagttactctactatctatcggtcaactctaagacatagcaaaataccgtatagatcaactataaagcacagtacactactgtagatcagctgtaagacttgtaaatgttagaaacattaatgtgttgagaaccttcagtattagaggcaatgtggtaaaatatagtgattgtatcatgaacagaaattacacttacagaaagatctaaaaagctcccacatagaagcatctgctccccgagaatacaactaaaagaaaaagaataaaattttactcacaacagaaacatctacttcttgctgaggatataagtcactgtgataaaagatacatttttcttcttggaggaagataaacacaactatgaaaacatgggttaacaaatgtggcagaaaagaaggtatttggagacagcatggtacaagggaggggcatgcactgtgggccatgtcttgtgtttctagctgtgatcttgagctggtaggttgacctttgtgatgatctgaccagaataagatatgggtttaaatatgaagaatcttctgaataacaagtatcggtgccctgtctcctttctcattggggattgagcacaggccctgtgcatgttgtgcaatcattttaccatagacttcctatgtctgtccttgaacttgtgttcccttgcttctgtctccctggcagctgagtctgccacatactcagttgaatctgtttctcaacagataatttaggaattcttaaaagctatgtttattttcccatgattattttaaagtaataacagtatccagaaccactgggaacctcaaacaggaaagaatatcaaagtgagaggggtttgtgctagatattttcaaacaatatttttactagaagtcatcagtagatttattgatgattatggatctgattgagaaaattgagtattaataatctcaactgtttactagagtgcatagtgctatcccaattattttctttttttggttttttttccagacagggtttctctctgtagctttagagcctatcctggtactcactctggagaccaggctggcctcaaactcacagagatccaactgcctctgcctcccaagtgctgggattaaaggcatgcaccaccaacgcccggctccccaattattttcaaataacaaaatcaactggttttagttatgtgtactggggtatgtgcaaatgattgcaggtgcccaaggaggccagaggcatcagatctcctgaaactggacttttgagcttttcccaacatgagtgctaggaacagaactcaggttcaccaaaagagcagtacatgatcttaactacttttaaccatcacttccatatgcccaactatttttgagagcccttacctactaaattttctatacatactcagaaatttgtctttttaatgagccattgatataccaaaataatcacgtgtctttcatatgtaagtttatggcttgtgcagaattaggatacaggtctgtgaaagagcccatctccacaataagaatctgcttctttgcaaagattaatgtttgctacattgtttgaatgcattgctgtccagaatggtttgatcatctggtggctccactggtgactgtttggtacagaacacaattgggcaatggaatagatagatcgggagaagttaggatgagaaaggctgggtacaaagtagcagagaatcactaggccgaatggatctagctgtgaagggcagagtcttctgtgcagtggcagaagttggtatcagattagaagggtagggccattgaagcagcagaataaagagtagctatataggagaattctggtataaggtgacaatgtggttgctgatcatccaaaacatcatactgactgggaatataagcactaacacttattaagatcttggcaatatgctaattaccatacgatatggtcttatgtaaacttctttaaaaatgctactgaatcagtgatttagcattcccattttaccaatggagaaagtgaatctcaaacactataattaactttcccaaaatgacaaagtttctaaatagtgtggctagaatctaaaccaacatctggctagcatgccagatccatttgatcactctacacctttccttaggcagggtgtgatccaggggaaaaaggcagcaagcaatcagggaagaatatcctagtctgaattcaggagctagattacagcccggtgaaggaagctgacaaaaacaacaacaacaacaaaaaaaactatacacccaaacaacaaaaacggactcttcaggttgcattcgtatgttcatgaatgtgtatatgcaatgataataatcagagaaaatgaggctatcatttgagagtggagggaaataagaaaggtggagagagaggatgtgggaggggatgaatgcagtaaagaggagagaagtgatgtgattatattttaatttaaaatatatttttaaaaaataaatacaaggaaatgtttttgtcttatatatgaagaatcctaagagcacagcaagagagaagtgtgagtgttgctggcttacaagatctgaggcagagtctcccaggagtaagctgagcttgtgtttggatgacactaggtaggaacaagctgggaggtgagaagcttctgaggatggacaagaagaaggagactcccactgtagagggcatcgatgttggatttaagatcaaaggaatagttgttatttttgaagaggaaatgagagaaggctattctcacagcagccctgaacatttgcagctgatctgcaacctgaataaaacacttttccatgctcagaacctaaagaaagtaagaatgcagtacaaacttcccactctctggaacaactaaaggacttacaactcaataacaaatgaaaaataaccccaaattttaatagaaaaaaaggattttaatatatttgtttgcaaagaaggcatacaaataaccaataaacacaggaaaggtgttctacgccataaatcattagataaacacaacacaaaagcatacctagacaccactttatatattcaggatgtctaataaaaaagatacacaattctacctacattgtaattgtcaagaaaataaatatatacaaattgttgagaaaaataaagatgcacaatagcaggcatagatagttctatccatagacaaaaaaagtaggacccacacattgtggatgggatgcaaacacttcagccacacaagaatttctgccagttcctccaaaagctaaacatagagttaccatatgagctaatgagcagtgaataatggtctcatcagtgagaaagattcgaatgatcatctactgaaaactcacatgcatgctcataatagcagccctgctcatcatagccaaaagatagagtaacccaaacatcagtcagctgatgactgcaggatgcaaaatggacttcatgttaagaaggaatgaaattttaatacaggtgaacttcgaagacatctaagggaagaagctagccatacaccagaatgggcaaatcatatagattgtggtctccacaggctggtgaaacaagggtgaaaaccctgtgaatgagtttagaaaaaaaaatgttggggggggttgaggcagggtctctctgtggctttggaggctgttgtggaaactagctcttgttgactaggttggtcttgaactcacagagatccgcctgcctctgcctccagagtgctgggattaaaggcgtgcaccaccactgttttgaacggcacaaatgttctagaatcacataacaatgagatggctgtgcaactttgggaatacactgaattgtattagaagggtagattctatgatgggtgaattctttgtaatgttctattgctgatgtcaatctagccagtatggaataaatcgtgtatattgtccccctctccccctgcagtatgttctctttaataaagtagactttacagggattttactagttatagtctggagatttcactttacaactatctcttgctcattctatatttgatttcacaaatttcctctaaatataccatgttccttctagtttaatttagctgtaacatgaccacaaaatacagtgtttctttgaaaccccaagtagggattacaagaagcttcaatcccagtgcagactcagactgcctggcaatggttccatggggctttgtgtttagaaagattctgaggctggatccaggctagctatgaaaagtggactcagtgattcagagtgatgatcttggactaggaggtgctgattaaggcagaaatattgagttagttaattaaactaagaaagttcattgctctactgggtaggtaaacctgagaataactagtatacatattcatacagagtgacccagagctgaacttgaggtctgtaatgcaaatgtggaatctcaacattttgaaatagtcaatatttgtggatgagatgtcaaaaatcactcaataaatagtaccaacttttatcagacaggaaaatatcaaagtattttgaataatgcatttttggtagagcatgcttcaaaggctcttagcaagcaatcattagcatatgcctactgggaattacaaagtgagaaagaatgtcaagacagatgtgaggagcatgactgtcttccactgggagaatgatagactttccaagggctatactcttggaataaactgtctctccatctccctgcagctaacctaattgctgaccactccatgtctaggagtaggattgtgtattcaacttccagctccatacaggaatttagtctagcttagacttgcaccagtcttgggcatgctattgcaaccactgggagttcatatgtagagcagttctgctgtgtccagaagataatgtttccttatagtcaaccacctcctctggctggcccttatactctttgtactccttctactacaatgctccctgagccttgtgatggagaagagtttggtatatatgttctctctaggactgagcattttgcaggctcttattccctgcatcccagccagttatgggtcactctattaaccaccaccctctacaacacttcccttttgtcgataaagtctcactggtctcaaatttgtcatcctcctgcctgattcttcacgtgccaggaattaagaggtgtgtatcaccatacccagtctaacacagccctcaccaaaaagtacagatatccccaattgataggcgctatgtaataacacattcactcaagtttgagttctcctttgaaccatctcctccctcccaaatgtgctataggaacctttgctgcactttctgtgatagaccgaagatgaccacctcacctgggcagagcagtagagctggccctggtggtgtaaatgcaggtgaaccagatctgaggacctgagagcaggagaactggccctgctccttgctgtaggctgccctggctgagctagctgaggcagtgctggagagctcacctggttggtgacaatgaaggaaagctagtgagctgaccaacccagctaccacccaggcccagaaccagggctacaagctggcccaccccaacattcatttcatctatgatctgctggagcaggtgaaggggatgaaccttcagccccaagaatgcaggatctccacaacacaggacaagaacaggatatacaagcggagccccattgagagtcattatctgtgatatagcagaaaccagaggcctagagccagaccaatgacccgtggcaatgaacacttacaagtaaagatgaatggactaaagagtaaactgtgtgactcaatgggccacagcttcctcaatgagctattctctctctctctctctctctttctctctctctctctctctctctctctctctctctccctccctctctccctccctccctcccccccctctctctctctctctctctgtctctctctctgtctctctattttgtttgtttggcttggtttctcttttaaattgttttgttttgaggagggatgttgcaagggctgaggatggcagccagggaacagggtgataagtaggatcaggatgcataatgtgaaatccacaaagaatcaagaaaagttaaaagaatttttttagaaggaaatgtcttgaatccgtagcaggtgctctaatgttactctggaacagcttcttattaaatttagtagtacctggtgataagagtatgtctagcccaatagtagttttgtgtctttataaaatgtaattatagaagtataattaagactactgtcaaaaggtagagcttactattgctggaatgatcctgaatactaaaatggacatttgattaaatatttaaaaaagaaaaaagatgcctagggaatgagctccgtttctttagaggggaaatggcccactagatgacaccagatacaagtttgaaaacttcagattcaagtttgagctttcttttctagaatgtggaaaggaaagagggaagggagctgaggcaggagaaactgggaaatgcccaggagaagtgggcatctacagcagcagctttgggatttgtcagggatgctggcagcacacagtgcagaagttcttttctctcttaggtcccatttcccacctttttacttctacaggaaaagtagcactctccacgcctccccatctgtcttagttatggtttctactggtgtcataaagatcagggccaaaagctgtgcacaaaacacttggtggtgacaatagctttaaggatcagacttaccatactgggaggcgggatctgagatgcttctaaaagctattgtcactgctgagtgactgccacatgaagattgcctcctggagataagcttgatcatggaatcctccaactagcaagatggcattctgggtcctagatggagggtgatcattggctgagctgcttcttgcctgccagaaccggccactggggatggctatttggagcaatgcgtgtgggaggataggctgaaggaaatcaaggaaaacatagatgtatttcagagctgtctggtaagagttcagcgttagggacccaaactaccaggggggagtcagcagccacatgatagaaggcaacaggttaatgtggacacaaatatgtgaacttgcgggcatttgcagtcttcaacttccacttccaaagacgaataagcaagtgaatcactaggctaggagtccaggttgccagattagtgtagaaggcttccattggtgttctgggctgcatttgttcccccatcctccataggaaagtgattgcatatcctggtccagcctgcagaataccactcatccatattaagtaggttaaaggcagagataggagagggtggtgggaaaatagagaaaagagaattgggaaaggagaaagaaggacgatgggagatataagagggggaaaggagagaaaacaaggaattgagaaagaggaagagatgctagaggaagacaaaacacaggagatccggctgtgcccactgctttccaagtcctgcacaataccttccacatttagttatatttggttaggaaagagtctaggcaaaggcaatctgattcttaattaaaaaaactcacactttgtctggctaggccccaagagccaggctgagtaactaaatcaatttaatcaattctgatgatacaagctaaatgcaaattaaatcatttgttctggggagaactgtgtaacgagatggttgagtgagtgtatctagtcactatattttgaggctttggggtccagcctgctcatattgctccctataatccttgtcctgagcctgcaccctcacccacatgagggccagggtgccttgtgcaatgggctaagtggtcctggtgtgggatgaggaaaagcaccagatacttggccttggtgtccagagttcagaggagttaaagagaaggaaaactggacaggacactccactctcttgagaggcccactaatctccagcctgatgtcatgtgggaaagtggctgcagtatgaccaaaccatgtaagggtgtccagcctttcacattgtcatataatagcctttacgactgtgttcggatgcattaacacttatcctggggtgtatgtggcccatgtgattcagggtagtcatgcccatttcacaggagaccagagacccgtgttcaggcaattcccttgggctgagacaatgcatttgcaggatctgtcttcccactggtttaatggaccaaacagttgtcttttgtccaagttatatgcagaagactaattcctcatctgtgttcctctctcaggccattatgtgtatgtggatacctcttttgccaagcaaggggagaaagctgtgctgctgagctctgatttgcaggctgaggaatggaattgccttcgcctggtctaccagataaccgcacccctgggctctgtatcacatcccagccagctgaacctctacttgagatttgaggatgaaagttttgatcgattgctttggtctactaaggagccatcagacagctggctcatagccagtctggatcttcagaacagctccaagaaattcaaggtaggtggggttaatgaggaagatatgaggtgtgtgatgtactctacggtacatgatgtattctaacagtggttctcaaccttcctaaagctgagaccctttaatacagttcttcatgttctggtaactacccaaacataaaaatttattgttgctacttgttaactaattttgctactgttgtgaatcataatgtaaagatctggtatgcaggatatctgatatgcaacccctgtgaaatggtcattcaacttctcaaaggggtctcgaccctcaggttgagaaccattatcttataaaaagtaagtcagtaaggttagttgcattatagaaagttaatgtaaattaatacttgtttattcctaaggctaaatggtgcttaagtttatctctgcagtgaaaaggtgctttcaggagcatttttgttgccaaccgtttttgcttcatccttctaaattgttcatgagctatgttgtgttgtcttcctaatggtttgattgctccaaagtttgaacaaagcattataaaatgagatgttaaaatactttgaaagagaaaagttatttcccaggcatgtttcctttccttttcagagaggctaattgttctgtcagctctgagaggaagacagaggatataagaggtggggtgtggaggggagcagggaatgaaggcagagtgtggcatgtaacaataagtctttcctccaagccacccgagccctgcagccacgtgggtgctttctgccaggccacccaagttccgcacactgccacgttatggtcccaagtaacacagagagacttatattaagtacaaatgctgcttggccaattactaggatttctcatctgctagctcagccttaattatcataaatctatatgttttataagacttatcttattggatgccagcagaagcatcctgtcttccctggctcacatggtgactccagagcagagaccaggaggaagagagaagggaaaagagaccacttcctgcttgtccttgtttaaatatgaatcagcctgctatgtcacttccttcctgtatcacaatacttctttttactacatttcccagaatcctccttgactcctagtcccatctaacttgccgcctcattggccaaacagtactttatttaacaatcaataagataaacatacacagaagtacatgccccatcaatggcacatatgagagtttgtgtcattgaggacacaacagagccaccaggagaatcccattcctaatgtactccattcctaggctcaaccctctcctttgaaatgctgtaaaacagagcatctcaggctagcccagcctgttgggagtctcttcccaccaagcagccactagagcaagaacgtcgagtctgagttcctatttcaccccatcctccaatggttatcagaccccaaatctacccacacagttgcaaaatatcctgcaaaagccacagaagaaaaagttgtttgagaaacggggccagatgcgaatattccttgaaatcaaccgcatggattgtcatgcatttatctgttctttgtataaaattctcaatttctcatcaaagtagaaactatggattgactgatccttcccatctcctgtggagatttctgactgacagatctgggctccctgatttctcatccaaggatttccccacacattgccttttttttcaaccccttcatcatctgccctcagttcctcagcacatgcttcctcaggaacactgctctcctctccatccaccaatgactgcctccgtgaacacaggaggatgtggaagtcagggtagcattggaagactctgagctcctgttggacactttgttcatgtcaaagtcctcagtgtacatgtatatgttcatgtatgcatgggtacaattacaaaagaatcacattcagcagccatgaatcacactgaatgacatctcctaagaactgacatattggacaggaaacatggtgtttgatgcctgactcctccccccccccatatgctccacagattttgatagaaggtgtcctgggacaaggagacatggccagcattgccctctttgaaatcaagatgacagccggctactgtattggtgagtgaattttgtgatcacggtggtggaatgcaaatctctttccacaatccactgccagaaagcactaaattgatcctaaaggccaaggatgtcatagagcatgctgcaaactgcatagcagcttctgttctttgatagggtcacctgaagatgggacattgatcctcagtctttggtgtggaaaagctcattagcatctaatctgaactggttggattaacaaggagaagcagtcacttttactcccagcaaggctctctaaccttccccagttctaataaaaacaattgctggcttgctgtgaactctatttttggtagtctttgccagaagagcaaacatccatcatctcacctactttcctgacacatgctactgctgtcttctcaatcattaaaattgccacttagatgctaccttgtgtgggcaggattgattgtctgcatgacagctttgagaaggcaagaaagggacagcctctgccccatggtacctgactatccctcattgcccctgaccataactctacacaatgaacactacacagaggagctagtatctgtgcaggtgcacatagaagaaaagggttgtctgggggcaaagcttgtaggagaaaggtccttaacatacaggtacaaaggccagagacaaacagtcagtaacccagagggagcttctcttacagagactggtctcaggacatggagcctgggtttaccagaattatgaggttggtaggtgctagacttagacttcaggggacaggtctgtaactgtggcttttggatgattccactggtttccatgagctggagacaaggaaaatacaaacacataggagctagcaaactcccagaagagactctgactttacggggattacaggatgaggaccttaaaccggggatgcgggagaaagtggaatagtaacttacaaagagcctatgctaatgccctgtggtgcagcttctctgctttgatctttcactggtacctctaaggcaaagaaggaaagcagatacagcctccatccaggcttctcccatgagtagtctaggtgctgcccctccatgcacaggaacagtcagacacacctgtgtagctctaccggctggctcggtccctcactgcacctccccaaacccgccctgctcttgtcatcagcaaagggagctggttcctgtgagggttgagaaaaagtggatttaagggtgggtactcaagaaatgtttgtttctttcccatagatgattcagtggcttctggtttgtttgaaacaaaaaggatgccacttaagtgtatcttgccacgccatcgcccctccttgctctgtgctcacttctcttggttccttgtctgtgcaattggggtaataacagtacctgttacaataaatctttctgccaaaaatcgcagagccctaccaccacgtatgcactttacaccagtcacctgcccgagttagggcccaaattaatacacagaaacttgtattaggtacaaagctgcttggccagtgactaggattctcatctgttagctcagtcttaattatcataaatctatacttacacataaatcttatacttatacataaatctatacttatactatacagtcttaattatcataaatctatcaccactcttgccggtggctcacatcccgccgctggaggaggtgaaggggaaaaagacacttcctgtttctccttgcttaaatatgagtctccttgctatgttacttcctgcctggatcaccacttctctactacatttcccagagtcctctttgactcctagtcctgtctaacttgctgtctcattggccaaacagaactttatttaacaatcaataagatgaacatacacagtacattccccatcaagtacctttctcaaggagctctgtgggggattaagtgaattcatagaaaaggcttagactagtgcctggaatgctgagaaggattttattacacactgtggcagcccttggcactagatgctgagcatcagttggcagatactgcagtggaaatttgaaaagaaatcttgagatctgtcagtgcttgctgacaactgtaccagctaggatcctggcaggaaggtgagaactggatgtggaggttgggggggttggggggatacagccttgcctctgtaatgtgaggaaagcccatcaacatcaatgagaacacaaagttgtgcagggtaaagacaccagcaggcaatggcactgtggccagattaggaccagccatgactcataagctgttgtctggccagccaatgggacaagagaagaagaattactaacagctggaaacagtggctgcatggtcaagactgcttctggccaggctgtttcttctataaagggacatagctcaccatggcaacctggcagtgatggagctggccactggcactgatgtcaccttccttcacctccctttggctccatccaccagtaagaaggtggatggagcaatagagtcgaacaggaaggacatcatccttcattctgtaattgcaggattatggtgtcatcggctggactgggcttataaactccctgttcccaatgaaagattttgttaatggggaacaatttatagcaaacttgtcaatgcacccaagtgcaaaggttctacttctgtatttctcatctctagtcaggagatgcaggagggctatgggccaggtgtgtgcctgtcccaactattctgactagattcttatttagaaagtatgggggggttagcatcttagaaacatgagttctgggaatcttgttcatcataaagagatggaggacagggtcagcaggcaacagaaagggtgcttcagaaaatatttagagctgagggaataaccctaaaatggcacactaaaatatagtggagctgggaacataggtcagtggcaaagtgcttaacatgtgcaagacaaaaatcatcagcttatatcaaacatgggccatatgcctggtgctctggtgctgcctgcccatgcctacagtatgttgtctccaattcacacaacaagaaacagactccgagatggcgggtcccacaacatggctaatgggagaaaaaggctgtggttcagaggggcaatgatgatgcagggcatcgactcattgctgcacctctcttcttgaccaatattgttcagaatttctggtccacaggcccccatgattgaggaagagagccctcagatggctatgggcagactctgcagagaatgtgggtgttcccaggtgtggctgcaggcccatgaaatatttatctattcctcttcctccagaatgtgactttgaagaaaatcatctctgtggctttgtgaaccgatggaatcccaacgtgaactggtttgttggaggaggaactatgaagaacacccactccatcctcccacaggatcacacgttcaggagtgagcagggtgagctggccacaaatgcagccttcttcctgagctaaccttgccttcaattcccacatcctggcttttgacaacagaagaaggggtggggaatcacactgggagacccagtgaaagagaaagaaaggaatgaaaggagggaaggagggagagagggaggaaggaaggaaggaaggaaggaaggaaggaaggaaggaaggaaggaaggaaggataatctgggagacagagacaactgcagacatgagctcatagttaagaaagccataaacgcaaagattttagctcatctctaaccttggatgtttttacatgtcagtggaatgttacacttcttatctattggttgtattcttatttctaaagacaaggctgggataatcccgatcttcattagaaattgcaggttggcaagtccttaagaatttcccaggagaccatcaatgctaatgattttatgtatgaagggtgcaacagggccccctggtggtcaagtacgctctgcaaggaaaatgcagagaggagactcttggtgatggagcaagagaaagcctctggaagggaaactagggcaactgtgagcttccttgtgtcttactggtcacacctggtccctggtttctccttaactacaagacatccagccctcaactctatgaccttttctaagtattgagaaaattctgactttccctcaagagcaaaagtaagaaatttggatcttttccttttcactattgacacatcctagtagatagtgaagggtccatttggtctggttaaatctctcatgatgacagcatggactcttgcctcgacacatgacaactgtttgtggttccttactgtccttcattgacctcagattcttgtcatctaaatgcttaaaagtatgtctttaactttgcttccagtgtgtccattctgcaggtcacctgggctctggagtccacatcttgacatcatcttgacatcactgttctctttgttcatactctgcctcctccactgtatccagagtctcagactttgtttcccataagggccgagcagactgtggctagctagacagttgagacatacagagtagatagatctgattgtgttctatcaggatgtgagcccacttcacaagatcttctttttcccttaaaataagcaggaataaaggggttgtttttgaaatttctctaataggtgaaaattggtggatattttctaaacaaaataaagaaaaatactacatgggctggcaaaaggttagctagctcctatatttcagcctctactttacagggtttttttttccttttcaacatgtccaggctacttagaagaaaatacttctaagtagccagctatgcatgcacatggatggggcttgtctccttaagataaatccaactttgcatctagcattttcattcatttgatcttgaattgggtacaatgaagaaaaggacaactgaaatgacaagccaccaggctgcttccaaacctcaaggagtatgtccaggaaagagaaccccattctctcacaagatcacatatgtcaaatattaccaaaattatcctcttcccctaaaaaaaaaaaagaaaggagataaatattcagagataaaaggacacttgtccaggtgactgtccagcagatgtctctgtcagatctagcatgcatatatatatatatatatatatatatatatatatatattattccttctgtggtctttgttggagttgaagacagatagttatggttatagttttctttagttattataaaagataagctacatataagactttagactcacaaagataggatagatgataaaatattttctttaaaatcttgctaaatgttaataaactaaatattgtaactatagttcttacttgataactgttttgttattttactatgttaatgtttaaacctttcttttatttagacagaaaagaggagatgatgggggaggtccttctgtgtatatgtttgttttattggttgataaagcactgttggccaatagggaagcaagttaggcgggaccaggacaggaggagaattctgggaaatgtaggaaaaggagagagtcgccatgtgatccccggaagagaggatgcataaggccagcatcctcagtaagataagtccttataaaaatatatagattagtagttatagttgataattaagactaaactaacaaatgagaaatcctagtcattggccagcagcactgtaactaatataagactctgtgtgttatttgggggccctaaagccatggcagaaccaaggcagctggcagaaaaagttatcgttacacacttgtaagtactcagagttaaaagcaaagtgctagatatccagagataaaggaaccattgtaagtcatgacaaatgtaggggaggtgtggatttacagtgagaggagagagaagcaatgatgctgtaaatagctgcgccaactacaagaagttaaggagagaggggtgggatggggtgaaaaagcaatgtataggcaaattcgaaaaagcttgaatgcaagaggtgaattcaacttcactgacaatgggaagccaacagaggtctttgaacccggggtgagacaatgtcgtacaatggctatatcaccctaaagctgattgtcctgctagatagaggacaaaaacgcagaataagagaataaattaataccccagtagctctttagatagaattagggtcagtcatataaggaactatgacaggaaaaacgttttcacttcctaattttaaaagaaagaattagtgcttttggtagtattgagagctgaaattctatgcctgacctatatttgaaccagaatcaactagtgaggccacagaatccacactagtaatgagggttatatgcagagtgaatggtggccagtggtagcatggccatgaatctgcacgagtattataaaagagaggttaacttcgaacaataaaatgtcagcaccactcaaaacctgtgtttaaatgaataaaaaaatgctaacaatctcttggagtttcataagagaaaatccaggtgactttctccttacccgtggagccaggctagcttggtgactgttcttctgttgtatcttataaatcaagtgcagagaatggtagggagttgaagctgtagtcatcatgggtctctgtttcacagttacacagaggttcaactgtgggcaagcactagggagatttcccaagccactcaaaaattagttcatggtcttctgatggcatattcacagtacccctgtcatcctcattgctgctgagagtcaactggctggagggatcggggaattctcaggagaggcaagaccagcctatggactagtatcagactgttcatgtgtctgtatttcctgaatgctgtctctccttaaaagggtataatctacagtgcttcctcggtggccacagaccactctggccatattgggtcagtgaagggtagagaatgaggcagatcaggagtcccagtgcttgttttcagttatcaaagagctggtttcctggagcaacccctcagcttctcagagtcaccattaacctatttgcaggtgaggaagggatttgcatttagtaacctttaagataacttttgcattgcgatattttatgcctggtgctgcacattaaaatccctgatttcagcacccattgagatctatttccgaactgtgtgggagcctcctgaatacttacaagcacactgtagttggcaccagagaaataaagaaagaaagagagagagagagagaagaaaagaaaaaaagaaaaggaggatgaaaggtaccaagggcctggttttagtggtgtcttgaccataaggtaaagagaaaaggactacagtgtagtcattcttgaaggccaccatgccctgctgatggggaggtcatcgtggcgactgcactcgcctctgccctctgttcactctgccccatttcctcctctctattttctaaccctttccacttcctctggctgtttctaaaatattccctaaaggcaagcagctttgcccgctagcgttgctgggtacccctcaaatcaatatggaaagttaaaaaggcatcagaccctatgtctgaaggtggaaagtctacagaaagcttacaccttgctgccagcgaaccaccagctgaccaccaggaagcggcttcttcattgacctctcctgtcatatagtcacccgtgtgctcattatatatacattgtaaacaacacacacatgcacatatatataaagcattcttgcatgctgtggtgatatgaaaagtcatgaactttaaagagatcttgtctaaaaatgtccttccccagaacagtagtttggggacatatttccttagtttctttcctgttgatgtgaaatactctgacaaagcaacttaagatacaaagggtttatttagttcatagttcatcgtttagtccattatcaaaggggaagtcacactggcaggagcttgatgtagtcattgacagtgcttcctcagtaaagaaacagagaacaaggggtgaatgtgacctttggtgagagggtctccccactttaattaatatcatcaagctaaagcccccacagacccatccaaacgctcatcttcaagatgtttctaaaatctgccaagataacaattcacacttaccagttcaattccactgcttggcaacttgacacccaaacattcatcctttgtccctatagactcaagactacattatgctataaaatgcattcagtccaactttaaacaaccccaaacctctcaatagttccaccactgtcaaaaaatgttccttaactgtgagcccctataaaattaaaaaaaaaaaaacagttacacacttgcaacatatcatggcacagagaaagcattcccattccaaatggaaaacaaggcataaccagaaacaatcaaattaaaacaaacccaaaatccattaggcagccccactcctctaactctgctacatcagcatatgtaaagcctctcttagatggactgtactcgtttataaactcccgtaaagccactccttatacttaggatagggcattaaaaaagaaatgagttctaaagaatctaaaatatttacctaaagacttctgcccacatgatgcaaaggttttcccagtgtgactcttgcagaaaaataaaactaccaacactctaaagaaaatagagattgtctttcttatttcatttgccttctattggatatattgattttctctgcactctatcaatttgggtggcaaagggaagattaaatggtccagatgtctgcctgcagcagcagattttcctctctgtggactcatctcatgttcaatcatatactggaagcaacttaagcttttcctttggtaagaagtggagaatcacatagcagagaccagggtgtggaaggacactttcccagatctttgtgttgctgaaaagggaacagtgaatacagcatctgtagaatgtaatataagcttcagtttttttcatttgattgtatgtttttaacagttgcccccaaacaatgagctctgacctttcaaatgtacactgtccccaacttcctgttgaatgacagaaacagatactgcactaagaattgagggatttctttgagatatggaaggaggtgtgctttttatcttgttttcttttcttgcccaaatctgattcactacatagtggtttcttctttgttaatattttatggagggggggggacattcaggaggtaacttgctgacagctcagattggatcagtactgttttctatgcatcttggcaaagagaagaaaattgatggaaaagtaatgaggagaattcattattttgcagaggcttgaggtttttaaaatcaagctgctcagagtgccactctgcaaggaactggacaaaatttccaaactcaaaataagatcaggattattttattcctccaaagctcatgagatggatgaatcagctctccataagtcatgccatttttctcactttgatttggatggagccccaagtgtcagctcaatggcacctactcattctctctgcatcccactgcctgggtcgtgtggcattagcacccagtgggattgtggctttgttcatttcctcagtattgccttcatacaatcttttggatctccctctgatattccatctttgaatatcagcctcctttctaagggttaagtcagccagggcaaaactcccaggtcttatctgatgcccatctctcaggctcttccacagagtagcagcatcggggacaagtttgtactttgtctctttctaggtcttcacttttctcttctttgacttccccccattccctgtaccacagttatgttttgggaatttgggaaagaacaatggggctcggaacataaaagaagggcaatggacaaacacttcctgcctggtgctgtttaatcttagcatgatgcccttaaactgcaaatggtcaaaggccacttctcccatggccaatgagaattgctctctaagtctcaagaaatgaatgatgctatttctggttgactatatgaacctctttcagattttaggaataatgggaccagccagattttctcaatgggtgataccatacacacaggcagtcctcttgagaggatttctctgaagtgctgtagcccactcaggccaaggaaaaagccagtgtctttattccatcaaactctagaaagtcgttggcaacaaaaattgtcttctcagcactatccccacagctctacagtcagattcttgccatttcctacatccaggaaaggccagacatttccctttgtgctacacacttatctttcactgatcaaattctctctagaactctgattcaattagggctgggaagatggctcactgggtaaagtgcttatcatgcaagcatgaggacaagagttcagatccctagaatcgaagtaagtggggagacccacctctagttccagaactctgaaggcagactagccagagcaagctggtgagccaggccagcattgtcaccaagctctggattcaactgagagaccctgtttcaataaacaaggaggagactattgaggaagactcctaaacgtcaatgttataactttacatacaaatgtacccacacatatacaagaatacacacacacacacacacacacacacacacacacacacacacacacacgcacacacacacgctcacgcacacacacactaaaaagttaaaaacaataactctgatcgcctttctgtcaaggtccaaggcaattgcagaacctggaactgtctgcctatatgatagtaaggttaaatggcaacttccatctttcattccctgctttatctgctccccttggattaaggtaagaaagagaaaaaaaacatgctgtaagaaaatacagcagggactggagagatggctcaaaggttaatagcactgacttctcttccagaggtcctgagttcaattcccagcaaccacatgttggctctcaaccatctacaatgggatctgatgccctcttctggcctgcaggaatacatgcagacagagcaccatatacataaaataattaaaagattttttaaaaaaaggaaagaaactacaacaatgacagttcccttccacaaaaaaaaaggctgtctctagccttctcatatatccttattagaaggaagatatggaataaagttgtcagaatcacctaagtgacaggtgttgtcacttgctatattaacaatccatctctatactctttagaatatagaatctctcagctatatgtgatgacacacatctataaccccacactcggaagggaaagacagaggaccaagaagtcaaggtcatcatgggctacagagcaagaccttgtttgaagaaaagaaagggaggaagagagagggaggctgagggagggagggaggaatagaggaaggggaggaaagaaggagggagggagggagggagagagggagggagggagaacaggaaatagagacagactcatattgcccatgttcttggccttgagatcttagcagagcgtagaagtctgtaagacagtataagtctgtcatacagagtagaaatctgttattctgagaaaaaacctgggggcaaatagcctaaaagtaggaaagatttattttggctcaggatttcagaggtttccatctctgtggtctgttggtcccattgctttggacctgagacaaagcaaagcactgcagtggtttgaacatgtgcagagactgctctctttacgaacagaagtgtaaagaacagaagggatcaaaaacagtcatacatccagtgacctttggattccaactaggcaccacctcctagtttctacagcctcccaataatgctatcaaattatgaatccattaattccttaatcgttgattaggtcagagacctcatgatccactatttccccaaagcctcactcctgaacactgtattagagccaaggcttcaacatatgaattctgaggggatatttcatatccaagttataacaatgtaccacccgacattcatgtatatttcttttttgtaattaatttttttgttagttcatattaggaacaaggttgcttcacatgtcaatcccttctccctctccctcacctccccccaaccctccctccaaccccccacctgcccccaccccatctaccctccactccccagggagggtagggccctcaagctgtctccccaaagtccaccacatcatccaggcctagtccctcccggatgtgtccaggccgagagtgtattccttcacatgggatgggctctcaaagtcccttcttacacaagggaaaaatactaatccaccaccagggtccccctagagtgctgaggcctcctcattgacatccatgttcaggggtctggatcagtcctgagctggcctcccagacagcagtctggggtccatgtgctcccccttgttcaggtcagctgtttctgtgggtttcaccagcctggtacccacccctttgatcttcattccttcctctctgcaacagggttccagagttcagttcagtgtatatctgtggatgtctgcctctgcttccatcagccactagattagggctctaggatggcataaaaagtaatcatcagtctcattataggggaaggacgtttaggttatcctctccaccattgtctatattgtcagttcatgtcattcttgtagatctctggaaatctctctagtgccagatctctcctcggacctataatggctccttctgatatggtatctctcatcctgctctcctctattcttcccccaactcaacgtttctactcctccatttcctcctctccccacctcttctccacctctcattctggcagctccctctcccctacccttatgctcccaattagctcatgagatcctgccccttcccattcctgggatccatgcatttttcccttagagtcctccttgtttcctaatttctttggtgaagaggattgtaggctggtaatcctttgctctaagtcaaaaattcatacatgggtgagtacataccatgtttgtctttttgtgactggattacctcactcaggatgggttcttctagttccatccatatgcctgcggatttcaagattccattgttttttttctgctgagtagtactccattgtataaatgtaccacattttctctatccattcatcagttgaggggcatctaggttgctttgagtttctggctattacaaacaatgctgctatgaacatggttgaacatatgtccttgttgtatggatgtgcattatttgggtatattcccaagagaggagtttctggatcttgaggtagacagattcccatttttctcagcaaccaccatactgatttccaaagtggtcttacaagtttgcactcccaccagcaatgggggagtgttcctttttctccacatcctctccagcatagattgtcattgatgtttttaattttagccattctggccggtgtaaaatggtatctcagagttgttttgagttgcatttctctgatggccaaggattttgagcactttcttaagtgtctttcagccatgtcagattcctctgttgagaattatctatttagttctgcaccccactttttaatttcattgttggtgttttggtggctagcttcttgagttcattgtatattttggaaattagccatctgtcagatgtggggttggtgaagatcttttcccattctgtggctgtcgttttgtcttactgactgtgtcctttgccttacagaagcttctcagtttcaggaggtcccatttattaattgcagatctcaatgtctgtgctactggtgtaatgttcaggaagtggtctcctgtgccaattcgtcaagggtatctcccactttctcttctagaagattcagtgtggctggatttatgttgagatctttgatccatttgcacttaagttttgtgcatggtgacaggtatggatctatctgcaatcttctgcatgtccgaatccagttgtgccagcaccatttgttgaagatgctatcttttttccattgtatagatttagcatctttgtcaaaaataaggtgtttgtaggtgtgtgagttaatatcaggcttttcaattcgattccattggtctatctgtctatttttgtgccaataccaagctgttttcagaactatggctctataatggagcttgaagtcagggatggtgatgcctctggaagatcctttactgcacagagttgttttggctatcctgggttttttgtttttccatataaagttgagtattgttctttcaaggtctgtgaagaactgtgttggaatttgatggggattgcattgactctgtagattacttttggcaagattgccatttttactatgttgattctacctatccaagagcatgggagatctttccattttttggtatcttctttaatttctttctttaaagactcaaagttcttactgtacagatctttcactgttttggttagtgttaccccaagatattttatggtgcttgtggatattgtgaagggtgatatttctctgatttctttctcattgcatttatcatctgtatatagtagggctactgattttttgagttaattttgtatcctgctactttgctgaaggtgtttatcagctgtaggaattccctggtagagtttttcaggtcacttatgtagactatcatatcatctgcaaatagtgaaagtttgacttcttcctttccaatttgtatccctttgatctccttttcttgtcttattgctctagctgtaacttcaagtacaatattgaagagatatggagagagtagactgccttgtcttgttcctgattttagaggaatcgctttgagtttctctccatttagtttgatgttggctattggtttggtgtataatgcttttatcatgtttagatatgttcctgttattcctgttctctccaagatctttatcatgaagggatgttggattttgtcaaaggctttttcagcatctagtgagatgatcatgtggtttttctttttcagtttgtttatatggtggattacattgatggattttcatatgttgaaccatccttgcatccctcggatgaagcctacttgatcatagtggatgatttttctgatgtgttcttggattcaattcgccaatattttgttgagtatttttgcatcgatgttcatgagggatattggtctgtagttctcttttttagttgtatctttgtgtggcttgggtatcaaagtgatggtagcctcgtaaaaagagtttggcaatgtcccttctgcttctattgtgtggaacaatttgaggagtactggtattagctcttttttgaatttctggtagaattctggagtaaagccatctggccctgggattttttttttagttgggaggcttttgatgactgcttctatttcattaggggttataggtcaatttaaactgcatatttattcttggtttaattttggtaagtgatatctatccagaaaattgtccatttcctttagattttttattttttttggagtacaagttttcaaagtatgacctgatgattctttcgatttcctcagtgtccattgttatacccccctttttgtttctgattttgttaattagcatgctctctctctgccttttggttagtttggatagaggtttgtctatcttgttgatcttctcaaagaaccaactctttgtttcattgattctttgtaatgttttcctagtttctactttattaatttcagccctcagtttgattatttcctgacatctactcctccgtggtaagtttgcttctttttgttctaaagctttcagttgttccatcaattctctaatgtgactattctccagtttcttcatatgggcacttagtgctatgaactttcctcttagcactgatttcagagtgtcccataagttcgggtatgttgtgtctacattctcattaaattctaggaagtctttaatttcactttttacttctttttttacttcttccttgacccaggaatggtgcaattgagtaatattcaatttccatgagtttgtaggttttctgcaatttgtattgctgttgaattctaatcttaaagcatggtgttttgataagatacaggggttatttcagttttttgtatctgtggaggttttgttatgttgccaagtatgtggtcaattttagagaaggttccatgtggtgctgagaagaaggtatattcttttgtgtttggatggaatgttctataggtatctgttaatcccaattgggtcataatttctgttagatcctttatttctttgttaagtttctgtatggtggtcctgtctagtggtgaaagaggggtgttgaagtctcctactataagtgtgtgtggtttgagctttagtaatgtttcttttacaaatgtgggtgccttcgtatttggggcatagatgtttaggattgagacttcatcttgatggacttttcctgtgatgagtatgaaatgcccttcttttgatcgattttagtttaaagtctaacttgttagatattaggattgttacaccagcttgtttcttgggtccatttgatgaaaaatctttctccaaccctttactctgaggtaacgcctgtctttgaaattgaggtctgtttcttgtatacagcagaaggatggattctgtcttcgtattcattctgttaacctgtatctttttatagacaggttaagaccattgacattgagtgatattaatgtccattgattgttggttcttgtttgttttggatttattgttggtgctgtcattgtgtgtggatttcgccctcctgtttcttttcctgtttggtaaagttggattatctattacctatgtttttgtgagtgtagttattttcattgggttggagttttccctctaggactttctatagtgctggatttgtggatatgtattgtttaaatctgtttttgtcatggaatatcttgttttctccatctatagtgattgaaagctttgctgggtacagtagtcttggttggcatccatgttcccttagtgtttgtaggacatctatccaggaccttctggctttcaaagttcccattgagaagtcaggtgtgattctgataggtctgcctttatatgttacttgacctttttcctttgctgttcttaatattttctctttattctgtaagtttggtgttttattatgtggcgaggggagttctttttgtggtccagtctatttggtgttctgtaagcttcttgtattttcataggcatatacttgtgtaggttggggaagttttcttctatgattctgttgaatatgttttctgtacctttgagctgtatttcttcaccttcttctatacctattattcttagattcggccttttcacggtgtcccatatttcctggatatttgtgttagagatttgttggacttgagattttctttggttgatgaccatatatcctctagcgagtcttccacaactgagattctctcttccatctcttgtattctattggttatactcacatccttagatcctaatcgtttatccagcctttgtatttccagcatcccctcattctgtgttttctttattgtttctatttcaactttcatgccttgaattgtttccagtgcttccttcacttgtttggttattttgctttagattctttaagagaattacttatttcttgaattttttgcttgctttttcttctatttctttaagaaatttccttgtttcctctttaagggtctcgacatcttcatgaagtagatttttaggtctgtctcttcttcttcctctgtgttgtgcttttcagatcttgctggtgtggagtccctggattctggtggtgtcatattggtctttctgttgagtgtggtcttactctgccttcttcccatcccttttttcagtgagtgcaggtggggtctctctatctcctcctgtcacccggtggttcaatgtctacagatatggatggtcttgcttctcctgatagtctcctcactcaggagaggttggggctgcagatggggaaagaagagtgaggtatttccagactcaaggaggtccttcctgtctgggcaagttcactctatgcaggcatgttcactctctgcagctgcaggcccagagagatcctggggtgatgggaaccttgggcagaagtagggctcaggaaaggtcagggagcccctatatttttttcatctttgaatgctgtaaaaaaaaagaatggagtcggctctattaaagacctgctcccacccttgaactaagggttcctgaaaatagctaccagatatgcaatgtgggaaagtaggtggattgactcactgtctttgagtgttgtctactcatcatggcagcagtcaagtgggtatttccatctggaacatgtttcttcagcccaagttgtaccaggaggcagcctgtctgggtagctagcaagatggaagcagacaaagcaactacagcaaaaaatgtggccaacgtgggatgaatcctagctgagtcccaggctgtgtttggcaccatggttaagctgtgggcaatctttaagggaattctgggtagccaggctgtttgaagatacatgctcaggaactgtcctctgagttcttctcctaaaccttgggaaagtggacaggggtaaagagctgctaaggctgtctgaaaggtttcactaacacagagagctgctgtaaggaagaagggaggctctcttcagaagaaagttcgaggactacactcaggcattacacaggaggcctaagtgtcagctggtattgtcacagattattatctttctggtgaattagacagtattttaccctgcagaagcctcgggtttttaagtataagtaagcatcgggtactaacagacttcctgagtgtgacaaagcaacagagcccagaggagtgccaatgaacatcctgattcttagccttgtgaggaacccattgtatctatttacactttttcatttttagttaaattggttttcctggttggttggttggttttgagaaagcatttctcatggtaagctatgtagcacaggctggcctcaaatttgtgatcttcctacctaagcctccatggagttgggatgtacaccatgcctggcctaaagttttaactctgggccttcaggctctgcaatgatttggttgtttataaaatcctgttaagctagaatacacctgtagcaggttcatatctgagttttcttgtacttagatcctaatgatctgataaaaatagtccttccccaaggtactagaaacccaacaaccctaagccacatcagactgatctgagctgagtaaaaaaaatcccataatgccaggtagacatgctttcttagaatgccaagctaccttcttccttcctattgacagagcacaaggacacaccccttcctccttctaatccccagctgcctctctcagcagatttcaccagaggtgcactcagccagggctttgtcatccctccagcctgggttccaggatcagacacctggtttctgaatcatcttaatccctttaaatcagatgataaacttgtggtgagctgtcttcttttttgtttttgtttttgttttttctggtaagaaacttcatgttactcaggttgtctataaataacacccaactgtgtcaacaaagagtcctagagaagaaaagaagggcagctgactgtgggctaggctagtggttccatgtgagacttggtgtcagcaatcttggtagcactcttggcaacctctctgactcactttgggcaagtcacattctgttttctggatgctctttggaccagaaatgtaactgtggtttgcttggctcagcaccataagcatgagttgttgacgaggcacttcaacggctaacgaggggatgaaaacagtattcccacagcaggtgaagaaaaccatccttgaccatctgatggctgtcagctgaaaagatgtgtttgtaaccgggatgtagctaagaaatttctctagttcagcacaataacagcacaaccctggagtggaacaggctgtttccaggagatctgttaggaactttcttttggagatagatcaccttaccatggaaagaatggtttccctcctcatggctgaggcagtttgagttccattagaaacagacactaagctagaactggggggaaatgcttgggaagaactaaggcagaaattgtcggtgtagctcattagaacagtgggtgcacgcatcttaaaaccatggcggctttaaggttccctcactgagctttaaccttggttattttaaaagcaaagtgaatagcaaaacaaaaataacaagtccagcccaaacgactttacctttatgtaccaacgcgttcatatactagacaatttcagatcctgagaaagaggagaggcccaggcctccagcagaatagcccagctgtagtgtccctgattgcgcgttccctggctcggagcatcctgagatggtgtgtctttggtaggaatgccatgacaatccacatgtggggcatctgagactgacaagccaatttcagtgcctgcaagttctgttgcagaaatctgacccgcttctgcccccatagtgaggtaggaggaaacaaaatcttacagctctctcttcatggcagtccccttgtaaatactgtttcactcttacgacatataacagaaggcagcacgcaatcatttatggtcacatgtgttctccattattaggatgttctgtggaggcaggctggaccctaggattatattagagggaggggcatgtgactataagaagtggtattccttatatatcagaagttctttgtgtccatcttgtgatatattgatttgatgcacacaatatttcgaaaattacagtaaggagtatttattatatatcaaattgtgctgcccctcgattaatatattaagtcctaaatcctcgtgcttcagagtgtgtccttctttggaaataaagtgtattacttttctcgtcattacgatcagatacctgacagaggcaacttaaaggaagaaggattcaccttggcttagaggtgaagggatgcagtccttattaatggggaaggggtcagagttaacagcagttgtcaacttgacacacctgggaagagggaacttcagctgagggattgtcttcactgcattgacctgtggccatgtatgtgagacattttcttactcattagctgatgggggggggggaaagctcactatgggaggtaccatccctgcaggaaggcctgggctgcgtaaggaaggcaactgagcaagctagtaagtagcattccttcattcatctctgcttcagttgccaccttgagctcctgtcctgacttccctccgtgatgggaagtaaccttggagttgtgagatgaaataaacctttccttcccaagcaactttggtcatagtgtttatcacagcaagaaaagcaatctagaacagaagccaaggcagccaatggcttcatgttggtgggaccatgggactaggatcttctagcatactgatataagagtaaacagaaaggggaccacaggtagaggtatgttataaaccggccaggacccacatcccaaaggatccataacctctccaaaaaggatccctaacctctccaaacagtaccactatttgaacaccaactgttcaaacacatacatctgtgggagacatttacagttcaagcataatatgtaggcttgtgcatgcaactaagaagatgcagaagagggtagactcccaatcaaatatgaagcgtggccttgagaaaagggaacttttaatgtagagagaaacacaattgagagaatgatgtgtaaacataaagactgagagctacaaagccaagggatgctagagaccatcagcagaccaacagaagttaggaggtaggtgtgggacacgtccttccttcaagggagccaactctgttgacatgatttgagactcagagcctccagcactgagacaataaattcctgttgcttaaatcacctcaaatgtgatattttgttgtcagcatagtcacaacacctcaccaaggacatgggattcaaagtcagttctcttcaatggagaatcaaagctcttccttttctccatattgtttgctccagcctttagtggaggttagtggctctgggtctgccaagtgctgttgtcaccagggtccatcaacagtggcatcacaaattcagactcccaaaccctagcctgtgagcactcttgtatcactcaaccacatggtatgcacttgatgtaagacgtgaaaatatgcggggggggggggtctcgccatgcctttaaaatacaagacagtacagtcttgacatctcacaactcaaaaaggcttaggaaaggatcacgtctgatatagtggtgtattcatctgtgaaaatccaaacacttcaaagatgacacatccttcctgtgtgaataatttacttcaatccaaagtaaaggaaaatttaaacggcttctcatcaggcatttgcagtgcgcaataagctgatgcgtccatctcctagctgtgacatttatatactcatgaccaccttcctcctctccccttccaagggattacattgaagtgagtcccagaatggcaccgtttcatctgcaacttaccagcctgtctgaccctgtatccttttttgtgtgatttccaggccactatatgtacgtggactctgtctatgtgaagcacttccaggaggtggcccagctcatttccccagtgaccacagcccccatgtctggctgcctctcgttctattatcagcttcagcaggggaatgacaatgtcttctccctttacactcgggatatgactggcctatacgaggagatctggaaagtggacagtccaggcagtgctgcctggaaacttgcagaggtggagttcagtgctccttaccccatggaggtaggtgagccctggcctggtggcaggcagagaagctacacaaacaggcatggaggtcactccactgtactttcgtatttgcctcaatcatacttttgaagataggtacacatgactttattttttatttttaagttagtaaaaaaaaaaagagaaggtatatcaatttatgtagtgaaatgtggtgttttgattcatatataagtgtggcaatcaagtcatgatagctatcacctcaaacatttattattgttggtagcagcaacatttaaaatatctcttcctggttttgaagtgtactgtgtatcattattaactatagctggcctactatgcaataaggaccaaactataagcttttaatctaattgtaattttgtatccacagaccaacattcccctttcccttctactcctgatgtacctgcctctattgtaatcttttagagggagggagctagagctaaagcatagctcagtggttaagaacgctgggatccaagccctgtcctcttgattatgcagcaagcactcttagctcctgaggcatctctccagccctttaatctttttcttccctctcttttcccttctcaacctccttacttctctcccttctcctgtatccccttcttcctctcttattatcttcattgtccattagaagaagttttctaaggacaagtgtggaagccagtctaccagctgaattcctgctgcatgttacctctgatcttgtgctacgaccatgaagacttcaaagtgtggtgtgggggcactaaggacctgagtataactccttcctgaacctccaccctagagttaccagtcatctggggtcctaagccaaaaagagagtcttcagctgctgggtttgggcagcttcagtttccctctggtttgtgcagcagtgatgggcagcagaaggtggctggagtgacagcaatggcagcaggaagggtcctgtaatgttacaactctagtatccagaccctgagccctacaaatgctgccctggcctgactgcctagaaagtcacgtttctcagtccttcataccagccaatgctgtagctgaaacccagcaccgagacccgtggcctcaaatgcttggctcttctagtgaccaagtcctacatgtcctcttctgtggccccctgtgactttttatcactcttcagtgtctgtctgtgaccctctctcaccatctgttcttgtggcccttttcttgctgctggccactccgagctgcctaggtgctgcttctccagctgtcaggaaccagctgtggtccttacagctcaggctccacactgcttagcagtctgctccacctgccatcaccaccactctgcagtctgttgcttctttcttcatgttgctcacccagaaaaaggaaaggtgactgaagagaagcttttggggggatctggagcagcagcgaaggtctcacagcttaaagtctccagaccgattcactaagtgagcctgagcagcctgcttatctagagaaccaatcgcagttttgtttcctggcaccaaccacagccgtggaggcttttatacttaaatcaatcatagccttgcctctttagcaccagtcacagaagcccctctgttaagcaccaagggaagtgcagcacctaggtagaaatgtagtaaggtcatctagagttcactgagacctgtgatagcaaaacatttggtacaaactgtccaacagctctggatgaagctgcaccttcagaagccagggcaatctctgtgatcactgtgtagctttctccaggcgttcaagcccactggagctggcacaagagtagtctggctggttgttcaactgatagtcctttgattcaaagaatccaggcagcgagagaaaagtcccatagctgctaattggaaggttggatttcccacgtccagcctttgcttagctacaggaaaatgcacatcagaaagcatgcttgctgtacagtgtttctgaacactaacagcgatcctttaacaatgtttgaacagtgcttaccacctgcccagtgccccaaggggagatgggtcctcatttgtttcattaaaatcaattttgaaggtttcctttgtctttctagaaaaaaaattgactttcttctttgcaaccaaaacaggtttataaaaccagaagcaaacatatcattagagctttaatttgagacaaatcttgttctatgttacaactcttcacaattatatacatgataaatgtccaaatcaaaagaattagaaaattcaaagaaacaaaaataagttaaacaacttcacgaggacaaagacaactgatgtcatagtgtttattgctgtagatctttctttaagcacatatctgaatctgtttctatagctgtgtgtctttcggaactcccaagtcctgacagtgtttcctgccctctaaagtgcatacaaacaatcaggcccctagttgcagaggacaaaggagacaacagaactgtccaagaagtctgacatctttttttttttctaggtcacacagctggtagatgccagtgagcttaggagacttcctagaccaaaatctaatgcacaactgaaggaagtgcttcagtctgtctgaggccctaaacaggccgcaaagatctgggggtgcagcagcatggttgctgagcatttgcagctagctataagtagagtcttcactgccaaagttattaataccccccagcttttcacttcatactttctgcagtgtcttctccagttccctttacagaacagaagtggcttgttcccctggctgcttttcagtggcgccatctgctagcctgctgcggaactggagaaggttgggcttgctctcctttccaatgtgctctgctgctggtgtgcccgacactcctctgtcccctcccgattcctctcagatccctcactccaaacagctccagagacagcacagtgcctttgtaaaatgcatgctatttcctgtcacaaagtctgatcagggtttgatttgagctagcagcccagtggaaattttctgtgagtttgggctccagaaggaaaagaaatgctgccccagaacatttttctctgttaaagtcaaatgagtcacacattaatgcacattcaggaagtttgtgtatatgcatatgcatgtgtgtgtgtcacacacacacacacacacacacacacacacacacacacacactgatagagtttcctttgccaacttcttttgtccaacggaagctcttagggcaacatttgcatgaatgaagcattgctggatttttttttttttaatcagcacttgaaaagtcaaaatgctaggcactactagcccttaacattcatctttggacccacatgtatgtggcttggctccactgcctgagtctgtcatttgtggtgtttgctcttactaattgccaagaaaaggaattggcactggagaaatcaaggaacttgatgtcatcacattctcaagtgcatttccaaaggaaagtaaacatgggcaacttttctgagccgagaacactggcatacggctgtgattggcagacccttgtcagaaagagcttcttaatctctctgctcaatatgagcagtcttttccctctttctatcagtgccccagtgtcattggtctgtggtggggtggggggggcatgcacacatcacaatttccccttttataaagactgtaaggacatcagtcatttggaatagaaacccacccttctgcagttataaccttaccttaattacatttgtaaaacctcactctccaatagggaaacaaactgcgatcctagggattaggactcggggtagccgctgcctcctttagataggtttgccttctccacacttgagaatctgcatcacagagagccaacttcatgtagttagaccttcctgggcctgccgtgctcaagtcatgatccacaacgtgacttagttagccactcacacagcatagactgcacacctgcattgttttcctaaaacgacatgggcctgtgctgatcacacctgataccttatggtcggtcacacacagagagttcaaagttagtaggtggaagataaggaagaaaaagtaaagtgattgacatcattgacccatagtttttgtgaatccattggaacatggctggaaaggcctaggcacagtgctcatctctgactactctcagctggagtgtcatatggggcaagggttacagaaaggttagtttcctgtagataatggaagaacctaatctgtcttctttgctgactgtttcttatagatgaagcccatggtgctaatgatttctggaattctgtcagaaatatcttgggcatgccaactgatagtccaggagtgaggaatgcagccaccagtaaatacaaacttcagatatgttggtcaattatgggttgctacaacaaactgctgaaacctcagtgacttacaaacatcagaaatttatctctcagtctagaaactgagaaacccaagaccaaagagggctagcaaatccattgtagcaatgtacttttcccagtacattgatggcatcttccactctgtgtccacagaagaaagcttggaactaaactcaggaacagagggctccaccctcttgagctaacggcctcctcaaaggattcacttcctaataccatcacattgaggattagacctcaatatataacatttctgcaacccaaacccctcggaatgtagcaacttccttttctctgaaaggggctgtgggttgaggagggtgataaccaaatagttacattttgggaaatgattacatgagtccttgtaacttggtctcaattgatgtgactgatgagtcattttcaatcgtctaagagcaagaatgtatgtaaatatatgctaaccggtccttttccttcctaggttatttttgaagttgctttcaatggtcccaaaggaggctatgtggccctggatgatatttctttctctcctgttcattgccaaaatcagacaggtgagtcccactccttctccctcatttggaatgttcctgccttgccagatgcccagagttggcatgtgagtttgactttaattacctcaccctttgtcctaccctatctttgaaaggtcatcaactgaataatcattttttctgggggtattactcctctttcatctctcatattgcggacttaatttctttgatactatacatacgttttcacgaggcacttgaaaagtatagtcttccctccctattagaaaaaattaaatattaatttatccaaattatttctttaaatgataccttgggtccatacaatgaatagatggatgaatttagaggaaaaacaaagacaaaacaaaaaactcacaacctaatggatggaattacaaaaaaactctaatttttaagtctccaagattcataatgtccttattcttacagatattagcattcagtagacaagtctgagatggttttacctaaacagtatgtgcttttcactaccttctttttcaaagtgaaccctcacataatgttagccaggccaaaattataattctataactttgatgtctgaaaagaaagggaattctctactttcttagaaaatggataaacaaagtatttgacaataaggatgacagtagttaaacaatgacacagttattaaatgcaattgtccttactgttcagtaaattcatttccttgaaacacaaagggtggcactgtgcccatcccatcttactaacaagcactctttctgtgtctggagcatgggaaatccattagtgaagctgacatttgtggcctgactttctgttaagacagatctggtctctaatatgctttcagctatatcctatcaagtagactaagttaatttttttccacttgagctacactgttatctgcaaattagagagaaacttaatttgatagcaagaaaactaagtgttctttgttgtagtgatttgaacaaaaatggcccccataagctcataaggggtgacactattaggaggtgtggccttgttggagtaggtgtggtattgttagagaaagtgttactgtgggtgagctttgaggtctcaaatgctcaagccaggcccagtgtctctctctcttcctggtgcctgtggatccagatgtagaattctaatctacttctccagcaacatgtctgcctgcatgccaccatgcttcctgccatgacgctaatgaactaaacctctgaactgtaaaccaggccccaattatatgtttttctttataagcatttccatggccatggtgtatcttcatagcaaaagaaatcctaactaagacatgttgttgttgtttcactgattctaatttaaaaggagttaaatgagaccatctcaatccagagcctcaggcatgggaggcaagttctctacctccctagctaccacttaactattatgtgcttatattttttttaaataatttagctcaaagattaaaattgtccctaaatttgatagaacacagaaaaaaaatgttttacttcttagaaatttgattgctgcctgctaccaccagttaatgtctcaattatgatagtggtaatttcacaatttccttgttaattttttgaagtttttcttctatgttactgggcacttacattgaacttttccatctctaagctaggcatgtgggagaagaagtatttgttcaatgtctgtgctggatggagggtgggatgaagaggtagccaggatgtaacaatgccaacctaacagatgcttctggaagagaagtggaatgtgcatgagcactttactttcctacaacaccggtctgactggaaaacaggaaaaaatgattccagcaaaccgaggctacatgagagggccagcagttcctcagtgggtaatatgctcgctcaaggcccctttccctgcaggaacacacgtgtgttttttcatacagcagatcagtcaaggctcttctactggtctttagaactcagtgtgcgtgccagtcttgcttttaaaaatcacttaattgcatcattttagtattatccccaagaaccaggaaacggattctgatccctttactcacacttataagctgtgtgatcttgtcatggtaatttttaaaaagatttatttatttgtatgtgttttgcctgcacgcatgtatgtgcatgcaatgcccactgtggacagaagagggtgtcagaactataggttccaggtggttgtgagccttcatggaggtgctgggatgacaacattgtatcacaatgtcaaaaagttaggacacttctgggagtctgcactactgcattttgctctataaatcctagaacacccaacaggccttcctgtctacttgtagaaggcctaattttaatgcccaactccaaaatgctgtgtcatatacaggcccgggcttctttctatccattcccatccaggtcagatactgcaagagtcctggcactcgtggttactcatccatactcctcagaaggccacatgagccaacaccaaccattcaccaacaccagaacacagctcagagttcttgacatggcccagagttcatgtctaatttgaacacaactccaattgctgactaaaccgtacatgaagttgctgacattttcctgtctctgtttcctaaagtgtatctgctagctattgagaggcccagtccctctttcctcatggttctctagcctaggaccaggtcctagccacactcactcttcccacagccagctttgaattttctcagctccctttaaactgctaaccatgctccaaggttagcttccttcaccatatactgtgtctggtgcttatctcttactgcagggcctgaggagtcttttagatttcagcactggttcttagcttgtctccaggagctccatggagcagaggaaagagggacaaacactccaactgctcttcccaggctgcagtgcactccaactattaggtcatctaaaatgcctccatttctaagaaattcaaatgtcagaaagcaagtatttacctaatgcttacaggatgacactttctgataacttggtttaaggggtttgctttcctttctttttcctatcaactgatgctcagaggcttgtgtctgcctccagttccccccatgcagccaacatgtcattaatgtgctccagaagcttggtttatgatcttcacttagcccaaacttctgaaacaagctgtgagcaagggctttgcctccacctcaaatgctggacagtgtactgggggtccctatctttagctttcagttactgtctcaatattctgcataaaaaaagacctggtctatgatttccaattttgaaattttctctttatcagaccatagataaatcacttctaagaccaagtctttatcaagtgaagaaaataacatgaccaaaaaactctgtgttaccgtggagaaaagtgatccttgctttaagttgcattttattagtgtatatggaggttcagccaagtgaggagaagtcacagcaatcacacatttatccctctccccatatatattactgtcacccagactccatactttacattaagggtcactgttggtattgcatgttccatgggtgtggacaaatttgtaatgacatatgtccatcattacagtgtcacacaggctctctctcttcttcctcccacaaccaccgatctttccctgtctcctgattttgccttttccggtatgccttgcagttgtggagtcacacggtgtacagccatttcacactgttctccttcacttaataatatacatctatgtttcctgcaggtctcctcacagctccacagataatttctttctagaatcttacattgtcttaatgtaccacagctcatgtgcccattcaccatctgaagaccatcagggctaagtccacattctggcagctatgaatcaatctgcttcaaacttttgactttcagcattacctctgccctctcttacagacccaataaaggagttcagattctcttgcagcaacccagaagcactattgtgaggttcattgctgatgagtaatttcaatgacctgatgatgtctttttgccaggcatttagaagtgtctcgccatttccagagctaaatggatggctgtacattttgaattttcatctgttttccattcccaggtagagagaagttgactaaaaattgagacagcagggtttcctctggtctccactctccatgggagaatgctgaaggcatgttgagagatcctcctgtgtgcttgtgtgtgtttgtgtgtgtgtgtgtgtgtgtgtgtgtgtgtgtgtgtgtgtgtgtgtattcattttgttgcaggttttctctccagttctggcagaaataggcagagcagcatgtgggtgaatcaccaggcctagagcattacagctctcatttccttttccactatcaggctcaggcatgtgacctgaaatccccatgttccagttctatgaggacagtttcttcttattcttttttggtaatacattgttagtagtcattaccaaaaaggagagagagagatatggaactacatttgtagcatttcaaactcagataaaatttacagggatacggtgatgaactcccacagactcttatttcagatctaaaaactgatagcattaggcagggcaaacatttgtcttaacaggcctttaagaacactgtacttctgggtttcagtgaggaaaccttggaaatctacagaacctcctgtagtagttcagtacttatccctagcataggtgtagactttgggagcccattccacatagaggaatactccctgagccaagacacacgggggtgggcctaggccctattccaaaggatcttataaactctgatgacaccctatggaaggcctcacctccaggggggagcagaaaggatatgtgataagtagggttttaattggagtggagtggtaggggaggaggggaaggagaagggaactgggattgtcatgtaaaacaatcttgtttctaattcaaataaaaaaaatctgcaaagaaaaaaacactttatccattgaactgtttcaatgtatatctgcagtgtaatgatgaaataactaggaaggtcaggaaacttaatattgacacaatgttaccaattaattcccaaagaatataactgttccaacagtggtttttttaaatatctatatgttctttctgggtcaaaactgaatcttgagttttttgcagcatttggttgaatgattcttttgaccatttactctgaccaagttcttccacccacatgagtgctttcttggtttgaaaattaactgagaccatagtcttgtcctaaacagccctgcgtagccagctggctgtccccagaatgaaagtttctctgcagattacttttcagttaaacacaacaacatcctttgtctctctggccctaagttatcccaacagtgtatctcagactaggctcataccgagcatcccaaactactatggtcacagtccctctgaccccagagagcaacctaagctgtgaggcttccaagtctcatgttaataggaccaactgttattcccaaaggagcaggattcttccatattccactccatccaggcagtctgggccaaagtgatacttttgactctgataaatgatagtaaaactcaacagagccaaacaagagcagcctgattgacatggtgtgacctctgaactgtgaggtttgggctaagggctgcttttcctcctctactgctaatgccaattaccaccagtccaatgcagagactagccaacagggggaattgcctctggaaaatgctgtttctaaagcatgtcttagaacttaggcatctcttcatccagtagttgatggaagcagaagcagacacccacaactaaacactgaactgaactctggaatccagttgcagagagggaggagtgatgagcaaaggggtcaagaccagactgaagaaacccacagagatagctgacctgaacaagaggttgctcatggacctcaggctgatagctgggaaaccagcataggactgttccagaccccccagtgaggatgtcagtttggaggtctagacaatctatggggcctctggtagtggatcagtatttatcccgagtatatgaatggactttgggagccctcttcacatggagggatactctctcagcctagacacaaggggtctaggccttgctccaaatgatacgacagactttgaagatcccccatggaagaccttgcccttcctggagagcagaaagggattgggttgtggggtagggagaaagggaggaggggagggagagggaactgggattgacatgtaaaagaagcttgtttgtaattttaaaaaaaaaagaacttaggcatctcttaaaatgtagatggtttgaaaggtttgagtaaacgctcagtcttcacattctcaaaggaaatcccttctgaagcctggcacgtttttatttttgtggacaacgtcatcagagctccttcttgccctccttttagaaaggagaaaagaacaattcccctgtcgtgtggaaacactgttttgatgataacctgtcagcctgccacttcaatgaaaatattttgtgtctcttcctcgctctcctagcacagatgtagccatatctgtcgactgtttaatagagcctctgagagtcccaggctgactgcaactttgtttcccatttgcccagggcttcctttcagtgctgtggaaaccagctgtgactttgaggaagacctctgcaacttttatcaagataaagacggtcccggttggaccagagtgagagtgaaacccaacatgtatcggattggggatcacacaacaggagcaggtgagtcagaggtccgtcaggccacacatcctgggcttgtttttacacaccacttgctattctgattccatttattcaaaggcaagggggggaggtaggaagataagaatgagaatgaagaagcaacactcggtgatacaagtggacacttttaaaagttgtcattcaagatgctacactacacaaagtatttgccattccattcattagatatttggaaacggttgtgcccttcatttcagataaaatactttacaaaaaaaaaagaagaggaagaagaagaaaaaccactggattccatctgcataaaatctacagaggaatccatagcgacacaaggcagattagtggttgcgggagctgaggtggcagggacgtagtggctgtgggaagccatttggggatgatgaaaatgttagagaaccagggtgatgactgcacttgctcgaaagttaatgaaatgaaagcatagtgactagcaaagggatagcactattaacgttgttgaaatggggattttatatcatatattctgccacacacaataataaatgccatcatgaggaaaaggctactagggaaaaaaatgagtgaacacctcatgggcatagctgtcccagacccagggtctgagggctgcttgagtattgaaaatactttaatgatgtccttgggaatctctctcaaggggcacaggacagacaggggactaagtaattctgtgtttcatttatttatctgaatcctggttactatgatgaatttgccacaaggttgagattgctaaatgtgcttacttacataggccccaaaatggccttggaaagggtcttgcaattttatacctaaaattgtacattgttttcttacaggttgtctaatttgagatggaaatacgggccctacaaagccttttctgaattttggcaaattaacccagagaggataaaatagtgatatgaacctcactctcctggctgatagccatttcaaggaacaaagaaattgatagataaacatacacacaaatgaacacaattccaagcatagcaaagggatgaaaatttgtccccttctcttttagtttctgcagctgagcctgacaattaaacagacatgaatcaggttagcaagagaaaaatttaacattctagtaaagtatttttaatatgcacatgggcaccatcacagaatgaatgaagactagaaaactacataggtctggaagcttctgtattgcttttaataaagaatgacacagttgtagaaagtagcaagataggggaaagggaaggatagtaaattgtgagaaactgactaggaaatctatggaggaaactaataaaagacaatggtgactttagataaaaagtgaagggcagagagcccttcctgcctctactgttctcaagtgcctatagctcaaaataaccaatgtgccagagtggcatattttgggggctatgttctgatggccttcagtgctctgagagagaatagagaaaggaactgattttggttggggatttaggaggggtctcttcaagggaagctgcagaggacaaggttctgtgaggtctctcggtgtggagagaactgaccacaccagctgtgtcataggaggggcaacatggctgcctgtggaaagaggtaggagtggagaagctagagcaatggatggcaggttgccagaccagagtaagcactgggggttaattataaaggaaataagaagccactgaaaggttttgagtggagaagagaaggatgaaatttaggttacaaaagggtctggctgttgttgtggccattgaaaggcaaagtaccacagatgggacttttgtcacattggtgaggctggaagtctggaatctgggaggcttttcttcctggcctgcagacagcagtcctatcactgttccacacatgccccacctgtgtgagggagagaacaagcccccgactcttcttataaggatgagattttaaaatattttggggaaactacgctggagagcaaacgctgaggtgccatgagaagtcacagaaagggggaaaactgttctgttctgcctgccattgcatacatggatccgatttaagttgattatgtgggtagttggattgatggaaagggaacctttgctgctagaaattcccatatgttatttagaagaaacaaggaaactgaacacagcctcagtacctgggagggcccatcagttagaaacatggtaaaaacatgtttaatatgtgggcaagagaacagtgggttcttccaagacacagaaatctcaatgccaggccaacctgccttcccaccacccgacaggccactccagataatagcctgggaatgagctcttgactgccaccgaatgtgacccagcaccagatatccagagagccagacagccagtggtcccaatctcattcattcttttttgttataaaaacgtatatttcttaattaatgtcatgaatctgagtctgtgtactgctttatgacatttacttgaatttctaagaggttttgtttgcaatggaggtataagaacattttattagatgtttttgtcatttaaatcacaaacattagaaaaagcatcttcatagtttaaagcctatggatgtagtcttggctggcaaactccattgctttggccagtttccccctgacagtctgcactactcactctgcattgctgtcaaactgagtgctttgtttcctttacagggcattacctgttggccaacactaaatttacgtctcaacctggctacattggaaggctttacggtccctccttaccaggaaacatgcagtactgtgtgcgttttcattatgccatctttgggtttttgaaaatgagtgacaccctagcggtttatatctttgaagaaaaccatgtggttcaagagaagatctggtctgtgctcgagtccccgagggctgtttggatgcaagctgaaatcagctttaagaagcccatgcccacaaaggtacagtagaaccttcacaacctgtgtccatttttacttgtaagatattttggtgatttctgtttagttactgtccactgatggtgttattatcatcttctgtccagattaacaattgcattaatacatttcacacacataacctgcccccagacagctgtatgttaagttttcaattcctttgcattttctgaattatgtccacctaagaaacacacacctccaccccccccccaccaccccccacccccccacacacacacaaagaacaatgctgaaaattaaaagatgagatcactgtgcctgggttttcactttggctttaactcaacacttaagggccttagaagagcacaggataaagacaggggagatcactagagccactgaccccactcagagactgacaccacaagtgaccagctgcttttgatagcaatgagaatacaaaaacagaccaacaactcaaggagaatacaaaagaatagcagtaatctcccaagcttaacaattcataaatttgaggaagtttcacagatgcaataaattctgtgaactaagataggcaaccagtgcaggaaaattcattttgctttggcctgtcagccaactaacagattttcctctctgtgtaagaaagagacccaaagatcgtgaacaaaggtcctttccttcaactgcatctcatacaatgggagctccatatgtattgttgagtagatgggcaaataagctagtcatcacactgtctaggaggtaccccaactctgagccccccaaggttaaaaccatgggagggcaagacaatcctttagcttgttgcccaggcaattccaaatgtgttctcaatgagtctctctcattgtaatgtcattcgacacttacacttacacttcccgtttgatccatcggttcaggagcagcccaggcctctctatacgtacatttaagtatcctccaagaactaaggtgtttacccatcaccagtcatttaactttcacaaacagttatcacaacaggcacacacacaacacacatacatgccagtttcacataatcagggtgcaccagaaagtagaatttatgttatgctttaaattaaattttattgatttttaaaggaaaatataacaagcatcttgtttatttgtttgacttacatgtttttattcactcatccatgtgtctgtttcttacttcaaccatcatttattctgtatatgtttgatgcaaggaatataaagataagtgaatctcagatcctattcatgagatggtgatcacatttgagataaactcactgaatgcccctatcccacaggaagattgttcagaaagctataaaaatggctatactgattgttagtaaaaacaatgtcatctggacttggcagacctaatgtttggagggtaaaagttcaagccatgatggcttctaagttctgctgctcctctcctcggtaacttctactggcaaatgctgggctgtttaggaatctgctggatcctttccagagaatccttgttgtcacctgactcccatgaagctggaacagcctcctagcagataaggatgccccagaggctctgcccagccaccgtgcagttccttggccacagcagggaaaatggaggcagacccagtcagggcaggggagctcttacagctcttggaaggaaccgctcatgcactcagatggaagttcagcacaggaacctccaggtgcatgtctgaagctggcttaattctaaaagatttctgctgagcagaactagctcctcagagttggagaggtgcagcaagtggagaggaattgaagctttcttatttatggcatacacacatgtggactttgtgtttatatgctatgtttccatctgtttatacatatgaaagctacttaagaaagggatacagtgaagagccagtgtttccatcactgccctctaaccctgaacgcaaacttcaattctgcttctgttttttttttttaaaggcgtttctttccagatctgcaatgttttcctccattaactttatctgtttgctgattctctgctatgaaaagttaaggacttctcagttttgttttagttgcttttattttgcctcttagaacataactttacacttcaatgtcaaactttagatactgtttatttacacctactttgtcagatgaacaaattctcactcttataattgtcctttgctttctttgtccatctcaaatatatagttgttttgatgttgttatgacttaaacatacatttatattcctactaagcccttgaacagatatcctagcacagatcctgttgacattataaggcagacaattctgactttgtatagagccgtccctcagattactggattttaaatttctacggttactgcaacaaccgaaattatttgcatatttataaatgaccccagatgtgccataccagtcttagatgagaaccattgatctataataattctatctctaattgcaagccatgtttgcttccttgccctctgttttgtagcagggttacaatgaacttttctcttgccacaaccccttggcttcttcttgttttttgtacctatgtgctttcttttactttctagtactggaagttgaactacactgaactcaggattggtagactagcagattttcagtgggtaaaaatctaggcaagtgcatgtttgtgtgaattgcctgcccagttctcccactctgagatgctgggagatatccctgcatgttcacagacttggatgggactcttcatagcccccaaggaagctagagttacatgtgtagtccttgtgtgagcactcttcaatgcctctgagaaaaagatttcagaggtacgacaccaaacctgtgaggttgttccctacctatggttcctgtccacagaaggtatgtttctccaaatcacatttagaaaagagtgttaagtcataaagcacgaaaatagacacagggtgaaagcttgtcagctgttacatgttgtctagaagcttctattggctgctttctacaatttaatcattcaatatttattttagcttattctaaactggtggaagcttaagaaagttttctgagcatattgagctttgcatacatttttataatagctggaatttataatgactaagattctgaaatgaacctgctgggacttctagaaagttccagatcaacccaggtcaaaaccagaagcaacgtggctgttcatcatgtacacactttgtgctcactcccaatccttagcatcctccaaccatccattgaagcctcagcatgttagaatggcttgatttgtcttagtttcttggtgctctccttcaagctgcaggcaagatcattaccctggggttctaaggtgcatctcagccttgttctctctgtgtcacttgccacccctcacacaaaatcaccaccacattcacctcaatgatgaggataccttgttattttccgtgacttgggcttgcatttttctctgctctgaaccatcagccacatcaaacagaagtcagatggtaccattccctccacgaaacactcccacagccggcaggacagagctgcctccctgactatggcttgtaaagccccatgtgatctggtgttcacccacattgatgacttccactccctctgctctgctcataggcacacggtctcatgggactcctctctgtccctgagtgtgaaggccattccttcatcaaggcctttgcacttgcaggcccctctccactggatgcccttccccatcaattcccgtaaccccctgcttcacacgcctctgtccctcatgaagggcttcctctctcacaggaactttccagattgtttcccccaacatattgtcttattttgtgtaccaaagctctccaaatccaaaaacaatatttggtttactttttattactcatctccattcttattaaagccttcatttagacaagtactttatcaggttttataatctctgtgtccacagcaaaattctgctcaattatattttgtttggggctatgtggtggatggatggatggatggatggatggatggatgaatgaatgaatgaatgagtgaatagccattctaagggtgttaaggagcagcactggggagtgaaatgtgatcttgctagccctaaggcttgcccctttgtgcagaagaactttgtgaggtgaaggcagaggtctggtcttaaggaaggcctctttttgtgcagtagaggaagtgaagcttccaacctttgttcgggtctaagtaccatttattattttatttcattccaataatgaacatatttaaaaaacaaacaaacaaaaactggatgtcatggctcttccagaggtcctgagttcaattcccagcaatacatagtggctcacaaaaaaatggatctcttcatagtgccaattccatcctagaatgatagtagatcatcccaatgactaacccagatacactactagaaactgatgatgacctgagagtatcctcatatgtcactgctgaaggaagagcctgcactatgtccttgatacttcaggctcaaagccaataactatgacttgtcagggtccacgccacagcaggacctgctttcatgagcgttattttcttctctccatggtttgttatcccaagtaacaaaatgcaacacaatgatgggcttcttggccagaactgtaaagtccaacctttcatcctgtcccccagtttctcccaaaaggactcccctcatggccttcctctcagcctgtttcttttcctttcttacccctgttagtacttatccagcccactttaaagaaaatgggctagtaagttaataatttcttgctagctctcttaactaatcatgaactgatactgttatctatagtcctatttaaggaaaggcagggaaaagtaagaatttcctttatatcactctagaaaaaaaaaagctatgtagtgtattctgtgcaatactattatatctgccaagagtgagggcttctaataaactctatgggacagccctctagctgccacagttccctaagaaaggaaaatattatgattgcctttaatagaaaagttttgcaaaaagtaaggatactgagccaggtgatggtggcacatgcctttagtcctagcacttgggaggcagaagcagatgaatgtctgagttcaaggccaacctggtccagttccaggatagccagggctacatagagaagccctatcttgaaaaacaaaaacaaacaaacaaaacaaaaggtaagaagacactgttcaaatacacatggctgttaaatggcaggtctgagagtggatctaggacacccagccctctcttggttgatgtcaaatgacatcaaccttccagaagggaagaaagtccagccctaagactcagatcatgtaaataatcaaatccagggctttattagactgagtctccattgatctatttcggaaatgttaggctcctggaggggatcagaattcaagctggtgcatcacagataaagcagaccagtgtgttagaggggagaggaagcatactgtctatggtgctcggctgtgggtcctctgtcacttacgcatcatattctggactagttctatggccctcttatctatgtaaccttcactgttacagaatttcccacccagttctgcaaccaccttgccccagatgaacacaccagacgctacattaattatgaaactgttggccaatggcttgggcttcttattggctagctctgtcttaattattaacccataactactaatctatgtatttccacatggtcttggcttactggagaatgccagacctgcaactcctttgcctactacatctcgactgtactggcaggctctcctgcctacctttcccagacttctcctcctctcctagtccctcctatcttcctgactcattggccattggcccaacagtgttttattcatcagtcaataagagaaacatatacagaaggacatccttatcacttcacttttctcccatgtgtaaaatgggtttctgatagtacgtgctgcataaagtcattctgtgtatcacatgaaattaggtgaagtatatagtatgtctcctggcatataattaacatgattaagttcagcacaacacagacagagaaagaaagaacaaaggctggtttttctaggtcacaacattgatttagtgcatggggtaatactgcatcttgattttgactgtgaagggttaaaatgacatcagagttaaatcattattattagcaatatcataatttcttaaataaatggaagatgtatacaaccatgagccctacaacaagattttgcatgtgtatgtttgtatgtgtatgttcatatatatgaggtgcagaggcacgtgagagagagagagagagagagagagagagagagagagagagagggagggagggagagagagagagagagagagagagagagagagagtgtgtgtttgttcgagctctcatgtgcataggcaagcaagagatcaatgatcaggagtctttctcaattgttcatcacatttatttatttaattttagatagggtttccttgtgtagccttggctgtcctgaaacttactctatagaccaggctagccttgaactcacagagatctgccttcctctgccttccaagtgctgggactaaacgtatacaccaccactgcctagccaccaccttatttttttaaaacaaagcctctcattaaacctgaagttccccaatttaattagactgtctgaccagcaagccccccagctctgcttccccaccaccacaactagctttttatgttggtactgaggtcagttcctcaggcattcgtggcaagtattttattggttgatccatttcctcagccccctctcctttaaaaaaatattttcaatgtttcagaaacatttcccaaagttcaagaaccataaagctatatcttcccttcccccatctctaccaccacagtgttctgcagagtaagagcagctggaaagattatttggggactatgtgtgtgtggtaacacacaccgataattccaacattttggaaaggtgggggctgaggcagaaggaatactgagcatttgtatttacaaagcaagatcccatctcaaacaaaccaataaacaaaagcaaagttaccagggaaagagaacaatttgtgagggtgtgttatagcttaatgagagagcacttgccagggagaggggcaaaaaggagagaaaaacagaaacacagagagacacacagagagacactcagggagggagggagggaagggggggaggaggaagggagggagggagggagggagagagagagggagggagagagggagggagggaggagggaggagggaggagggaggagggagggagggagggggaaggagggagggagggaggggggaaggagggaacactttgctccaaaatggttttactaaaagcaaactgtgaggaaagactccagaatgagaccagaaatttcataatgatggtacccaaacattagccttccagccttcaaattctacagttaacatatgtttggtcactgtcacaccatggagggtagattctgagtaaattcttgccggcaactacttttagcaaagatgcttcaatagccttttaattaaaatcactggctgtagggagactcactactttgttaattaagtatttattggagggggaagtaatgagtctaataaatgagaggatggcaaaacactatttcttccaggactgggttaatgatcagcttagcaatcatcaaaataagcaaaccattctaaatctacatccttactctgctgtaagactaaaagtcaaacattgaaagccacatgcttttacgaggaaggccccatccaaccaaatatagtttccccagtgggttaaaaagacaaaaacaaaagctaaacgctatgtcagtccttagctatgcaccatgaagtgcacacaactcattagatgttccaatgaacaagggctctgtggtcaaacgattcagtaaattcctgccaatgtcatactaaagaatcctgtttaactgtgtttaaggtgccaacttcctcaaagcatgtgacttggagcctttttattatatagtttctattagtactataccattctaagaacatgtaacctacttactgaaattgtcaacttagctgcccacatgcttcaacaaggctacgagcttctagagatcagggagctgtttatcatgtatctcattggttttttacctctaatgctgacacaatttctggaacagaataggtactcagtagacaggggggggtactgccaatgaatgtgtattaacagcaaggaagaaacacccttctgtgaaaagaagaggggagactaattaccccctattgaacctgaccagactggtttggctcagtttcagaggtcataactggtcaactggctccattgtttctgtgtctgtggtgagacagaacatcgtggtaaagagcatgtaggagtctgctcacctcatggaagccagaaagcagttacaaggaattggagccaagaggtgcacttcaaagacacatccctggtggtaaagctcctcatctcccctagttctataacctcccaacagactgtctgaactttcgttaacagatcaacccatttgtggagccaactcctcacaaccctgtcccttcacaaaagctccacctctacatgctgcttttatcacagaccaaggctgcatttcaggagaactacagagtgaattgttaaaactccaaagaccctgagagagtgaatataatgacaatattgtacacacacacacacacacacacacacacacacacacacacacactgtgcagaatttcacttttttaaaatggtttttaattactgaaaccaagagctatgaatcctccctttgaaacaaatctattctaacattgttccattttgctcttctcaagaacctctgttgggcttcaccagcgatcccaattctgacccctcctttgcccccagtgttgcctccattctgcactatgatcagtaatctgcttgcttctacattatactctcgccagcccaactcgccccatggctttatcatctgggtatttctaatctatgaggaccctcggctgctgctttctttactgtaggcttctcagttcagctggaggaaacagactgctctgtcatcccttctgtgatgctggaaaagcctctgtgcacctatctcagtgaattactttcttgtcccactgtagctgttcccatccatttcccatcttcattaacagacttgcaacttgagcctccctgtttccttcttaggatgtgatctcatggcttcctttcctaaaatgatgaaggtatctggccattttggttctgttcctctctgaatcctttcctgtcatcttcatctcctggtcagtctggtcaaggaagtattgtccttgtttttaatgtaaatgagcccatacatctcgacttctgatgtcactcccgcatcttccgaggttggatttcgtaaaccctcccatctccgtttgtatacacactggcgaagaatgctgactcctgcattctacacagaggaacaagccatcatctcagtgcatttaagctaccctgtaattgtttgttttgtttttaccttttgctctttggggcttgaggagggggacacacagctcccaaataaatcacatggaatcttactctttcttatgaatgtgtggccttagcttggcttgtttctagccagtttttcttaaattgtccagtctatcttttgcctctgggattttatctttctctatttctgcatatctttctgtacttctttctccatggcttgctgtgtagctgggtggctggcccctggatcctttcctcccagagttttcctccagcccccccatcctttctcctgccttgctattggtcattcagctctttattagaccaatcaggtgttttagacaggcaaagtaacacagcttcacagagttaaacaaatgcaacataaaagaatgcaacacatctttgcatcattaaagcaaatgttccacagcataaacaaatgtaacacatcttaaataatattctgaaacaccacccctcatcctcttgcttcagaatccacacttcatgaaggaagcatttgttgccagtcactgtcaatgccgaagcccatttctcactccacacaccttcaccctctgtcttctttctccggtgttccttcaaagggtctcagcagcagacagtatgactcattgatgcttctgcagggatctttacacttggggggaaatcctatccttctcccaaatgcctctccctctgaagcttgtgctcacttgttggagtgaaatttgtatagtgaaagagcagtgggtcaaggatttgaagaccttgtcttcagagctcgtctcttgcattaactatgtagctcagaatgccacgtcttctctatttgaaatgagcacatgcactcagatgacctttaagtctctgcttattatatttttaggtatcttagtggcaggaactgttttattcttgtgcaaaatgtattttttgcagatgctttcctctacttatttccccttacaagaatctctttccttcagaggggaaaaaaaaatgctgaaattcaagtgattcggatttccaccttaaattcctcatcttaattgtgcccttaaataataccaaagtaaacaactgtaaactgtctagcgctctgaaatttttcaactgtttattttattttgtgtaagtgttctgtttgcatgtgtgtgcaacatgtatattcctaatatatttaatataaatttattctaataaactggtaaatgtaagctaagcaatattaaaggggatatctacaatgaaatcagaaaaaatacaattgaaaatatacatctaaccttatttgtcattaaagacattttaaaataataacattcactatcaactgaatatatgttttaaaatatagtaccctaaagtgtgatgtgtgtcttagtagctctgtttatattttattctgtttgtagtatttggttttttaattagaataaacaaacctttgctttagaaaaagatatagagggcaggatgtaattcaatggttaggatgctttcttgacaggcatagaaccccgagtttgagcttcagcacctcaaaaaaaagaaaagaagtgaaatgtctatgaatttattcatgtattaaaaagtaaatcttttactttagatccccaaatatattaacatgtatatataaacatgatttattttaattaatatatgcattatatgatatacattcatgcatatgtaaattttgtatgtgcgtacatatgcatattaattgtgtgtatataaacatatgtgtatgcatctgtgtataaacatgatcctggaaaggtgactgtcttaggattactatcactgtgatgaaacaccatgacggggaaaaaaaaagttggggcggaaagagtttatttgccttatcacaattcatcgtcacaggaagtcagggcaggaacttaaacagcacaggaacctgaaagcagggactgatgcagaggctgtggaggggtgctgcttactggcttgctccccaaggcttgttcagccttgttttcttataaaaaacccaggaccaccagctcatgggtgggccccacccataatgggcagggatctcccctatcaatcactaagaaaacaatatggcttgcctgcagccacagcttagggagacattttctcaattgagattctctcttctcagatgactgcagcttatatcacattgacatagaactgcccagtacagtaaggatgcaaggaaatcattctcatgtgcttttttaaaaatagttttatttactttattattattattattgaggagcatatggtatatgtattcatgcatgtaccatgaaggatatgtggaggcctgagaacagccttgtagaaccagtgctcttcctcaactttatgtgtatagaatgcagatcatcaagcctgcattgtcaggtaggtagcactgctaccattgagacaaaccggggataaatgagtacaattttgcaatcactatttaactatatttataaaaaggaaaaacatcaaaacatgtatacctttggtacaatgactatatttctagggatttatcacaaagagataattattgagtcaagcaagatagtacatgcctgtaataccagatgcctatgtttgagttcaggttcagcaacttagtaaaaacctatagtggaagccaagtggaaatataagggtatttaacagggaaaagccttaattacagagcaacctggcagtggtctggacgcaagcccaaaagtgaaaccgaaagagagacgcagtccccttcaagtctcactctacctcattctgaccacgccctaagtaggtgtggctatagcttcccctacaaaaacctatcctaaaaaattaaaaataaagccaagtggtggtggcatacgcctctaattcccagcatttaggtggcagagacaggcagatctctgtgaggttgaggccagcctggtctacagagctagttccaggacaggcaggcctacacaaagaaaccctgtctcgaaaaacaaaacaaaacaaaacaaaacaaaaaagtgtagccctgtggtagagcatgtacctagcattagcaaagtgtgccctgagttagatttcagtgttccctcaaaagaatggaagagatggggagatgggtggaaaggggacggaagagggaaagagtcagagagagaggggaggaagggagggaggaagagagagaatagatttatctccagacgtttgttccagtagtcttgtaaaactgagaaatggaaagtacctggctaaataaattgtggcatagatacagaggagtcagtattatgtgagctatagccctggctgttatcaaaaatctttacgccaaaagccctaccaccacatgtgcattttacgccagccacccgcccgagttagagcccaaatgaatacatagaaagatttgtattaggttcaaagctgtttggccaatgactaggattctcatctgctagctcagtcttaattatcataaatctgtatattttataaggcttatcttatcggatgccttattggcgtcattccttgccagtggatcacattgctctgctggaggaagagcggagggggaaaagggaacacttcctgtttcctttgcttaaatatgagtctccttgccatgtcacttcctgcctggatcaccacttctctactacatttcctcgaatcctctttgactcctagtcctgtctaacttgctgtctcattggccaaacaagtactttatttaataatcaacaagataaacatacaaagaagtacattccccatcacatggctctctagtcaacttgaatatatttgccttgggaatccctgctcctctggataacattgcctctgtgtctcaggtctgagttgagcaaagcgagtattactatttgtgtacctgcaggggactccctaagtgttcgctgtcttatcccgaccatgagctactcctttggaacagagtgaacccttgagaatcaggagagcctggaaagtcttcctttttctgctctttagtgattgcattctgaatgtcttctagtaggtcagacatttttatgtctctttttgagtgagctgcaacaataactccatgttaaggtgtctgctcgtgaacatgacacagcaaccattgcactacatttcatcagtcaggaaagtgtttggacaaggacctttgagggaagtgggccgaaaataagtcatattatatgtccacagaaacagtgtgtttttattttattgtaatgttagacccccggaaaactcaggtatccggggtcccaggccacgttcgcggtcaccccaatcaccaggcggattcgagagcttgatgcaaactgcacgaggctttattgtaatttaatgagctaaccccatgttagctcgggtctttcacccacccgccatggcagatggctcgcaaaagacggctcctagggcctcccaagagatcttataggacagcgtaaggggagtgtctaggggtacaaacaggctcaggattggtgtgcctccaggcttggagggcttgccctgtgttgattggtcaactggttgttatggcccataggccctcccagggtggttgctatactttgtgcgtcattgctgtgcgcttgtccgtaaagcacacccagggtcgtaaagcatagcgccaccagctaacttctgattggttccttgtcatgaggcaggcatctgactttctagtgtctaggacaaggtcatagaagtttttggccgttatggctgcaaaaagggaagctggtcccttcagtaattactagtgtgtagtaattaatgtgtatttccacatagacacaattgtttttcacacaaaatcacgaataacacagaagcggagctatactgggcttccagtctcacagttttatgcaggtcatgttgcagagacgctgtggcagtcggacttgaacacagcatggtggtttcccgcctctgtacacagaggccacttctctaagtcacagagcatgctgcatgacagatttagcttttactcactcaggcaaaaaaggtttatggacagtgtgctacaagctactttatggtggcctagataagagctaaagtgatgagcacagctcccagagctggcagtaaacataccaccgccattttagaaagctgaactgatgtagccaggcagccagctgtttctgtcatttctcagtttttggaagtcgcttgcttgcacttcctgcttactcagttaatattattttcttcttgagtctctgagggagctgaagactagatagtatagttatagttttcttatttaccagaatcagcaaagaaacttactaaagatgtgttaaatgtaataggtttgaaagatattaaaaggtaatttgataatgccaattagaatagaaagtaaattagatacaagactttggactcatcaagaaagaatagataatggagaattttccctgaatttgtctaaagctaatgaactagacattattaatgtacttactgcctatatatattatatatacttattgtatttattgtatatagtttatcctatattagttacaacctttttaaattttagacaaaaaaaggggtgggggttgtggtgatatacggcttgtacaaataaagcccgtctgaaggtcagagaatggagcttgccactagctaaccatagaggtctggaggtctgtacggatagatgggaagtgagctagttgggtggaaacaggatataagcagagcgaagcaggagatcactgtcctgtttgctgagatgctaaggaggtaaggtatggctgtggcttgctctttctctctgatctctcagcattttcctcaatatctgacttcaggtttttattacttagaccaattaggaactccattacagataacctggaggtccctaaaaagtcaccaagtgactagctgtccccctgaggggtatataaagcaggaaagccaaggatgagggcatggctcagtaaagtccttgccatgaaaacataatgacctgagttgagatctccaacacccacagaaaagctgggcatggtatcacatctctggaagacaagcacttgaggaggtagagacaggaagatccccagagctcactggacagccagtctagccaattgttgagctccaggttcggtgagagaccatgtcatgaagagcaacagagaaagatattattatattaacctctggccgctaggtgcacacacatacacaaacatgtatatgcacacatatacacatgcatgtatatacacacaaagcaggataaatccacacctatcttccatcagtgacaaaggggttatgatatcattatagataacatcctcattattaggatatgaaattagattctgaaatacctaaccctaacttttctttgtctaatatactttgagagatctcacattcattttctcacattagggtattgtgtaaaactggccatctgtgtccccagtgaaaaggatataacgttggtttcaggctttgctctcaacatagaggaagtataaaggggatatgatggcggggttgtaggatgatggagcagagatttgggaattctttcctaaagccgtaatggaaagatagagtggaaaggtaatggtaccaagtgagggagaaaagagcatcctggtgaggaggagctgctatgaagccagaagaggttacagctggatccccattctgtatcagccatcagtgcactccagtgctcagtgacagggcaagcatggaaacatgttacctctactttctttccctattacaacctcctgttagagagttaaggtcagcaagagagtggtaaagcaaatgtaagctccaatccaagttttgtgtggcacgggcaccttcagaaacaaagactctgggatccaggaatatgctctctgtgctgtatgaaaatactattggctaaaaagaatgtactaatgacaacaggtagggggcaggaagagaatcttgacacttgcagtcccctctttgggtcccaagcacagtcaggacctcttctgaagtgtgtgtgtgggggggggggggttatataacttataaggtaggtcagagaagttctgcatggccatctacagcagcaaaacagtaaagattagggtaatgtttctatgttttatgatgagatttacagggaagggggattctagcttttatcacttcccttagagaaaataaattctagtctctacagactgtttttgggaggacctggagacaaaggtataaagggggcaccagcagctgtctagagggttgctgagttcattccctaaaagaaacaaagaactgagcccacaggaaagagagaagaccaagctgcagggaaagggaaagtaacagctacatccattcctgaagctggaagtcctttaaatggtagatggctcaggtactttgtttatgagacctctgggtcctccctttccacttctgatcctgtttaaatgtcagccccatgccttcccatctttctccttataaggttttctgggaacaataaacagctgtattaggaagcccgttttcctttcctagtctacctacttcactctaattctccttcagaggagcaagaaagtttgcttccgaagccctgccaatgtccttgagttcaaggtagctgggacagtaaagcagggtactttcagagccccgactctgaagactcttagatgtaagacggaagtacctggtataaagtcaggtctagcattctttaaattctaagatcaagtatttcagaaccatagttttcattttatttcccttttattaaaaatagatattttttctcaaatcatttatcctgattacggtttcccctccctctactcctcccagttcttcctcacttcctctcctgtgtggatccactccctttctgtctctcattagaaacaaacaggtttctaagggataataattactatagtataatatgataaaacaaaaaactagcacattgtaattaaataaaacaaataatcagaaggaaaggagcccaagaaaagacacagaatcagagacccacttgttcacactgaggaatcccatagaaacactaaactggacaccatgacacatatgcaaagggcctggtgcagaccgtgctggccctgtgcatactgcctcagtctctgtgagctcatattgatttagaaggtcttgttttcttagtattcttcatcccctctgtctcttacactctttctgcctctgcttctgcggtgtggtgtggggtgggtgtgtggggaaggggttgtccttgagccctggtgagagagatttgatggaaacatcctgtttagggctgaatgagtagcagtatttttaagtactaaaggcaggaaggacaagatgagcagggtgatatagttttccccatcatggaccaggcaagaatctggtgttttgtgcttgaatatgcagcttgcagttgtgtggattcagaccggtgctgcccttgtcttgctctaaaactgatagattctgaggtctcttctgtccttcccctactttccagtggcaggaagatccaaaattgatgcagggtttttaagtcagtgaattttgagatttgaatgttcaccacccaaagagcaatgaaaaaaaaaattggccatggcctgtattctatcctagcatgtcctctacctcaaacggaaggcatgtataaacaaagagcattttgcactgggaaaatctggaagctgatcaaactttgttgcttgtcaaagctagaagttgaattaaatcatatgagtctttacaaaaagaaaaaaacagatgggtctttttgggtctttaaagaagaaagcattggtcagcaaaagacttatttaaaaacacatggtccttttgtggtttgtgagacatgcaaaccaaatatagcatctgcaagaggcatgctgttatggttagcaacaatttcctaaaatatagccaggagctaagaatgcttaaatctcacacttttccaggtactactcctcttagcttgtccttagaaacttgcagaaattccttcatttctgccaagtatctccattttgaaattcgtgttgttttgtgtgtgtgtgtgtgtgtgtgtgtgtgtgtgtgtgtgtgtgtgtgtgtgtgtgtgtgtgcttttggagttttaagactcaaacacactaggtgactgtcaatcatttaaatgagtgaaatgacgttagatgtccatactatgcttgtgtccacagcatcttaatgaagggttctagaatatcactaagtatattatagtaattttgtgaataattccaccaactctgtagccaccactcccaagtatatctgtgcaaatggtctcaaagggttttaacatcacaagaagaaatgttcagtttaacttgggagctgaggttgaggcccattattgataactagaaataactggggtcctttgatggacatggtttatttatggttttactggcagaggattgagatgttttgatctgaagatcatttatggaggctgtccttcacattctaaatataggcctaactggggctttccattgctaaagtcagtgtttcctccaccactcaacaactcaccaggccacaactcaaacaggccacagaaatgtctttagaaatgaccatgcagtttggccaggttagccctttagtacagacaatccttgttaatggttcagcaaagaccatattttattatgttctacagctttttacaaagcctgagctccttcaccttgcagatcctttcattgtgttgactagcattttcattttggcacctctaaagtgaaaattggtaaatttttctgaaacaacctgatgtggtttggctaaatgaattcctgataaactatttctctaggttgtccccatacccgcccccagctactcttaccaagaacttaccaagacttccactctcttagggacagtctggctcctttgactaacagagcatgagcaggttttcacacagaccctctcttcatcctcccctctaaaatcagccacatgccttgcttgctcaattcccccctaagttcttctgctcactattagtatcttgtttctagagagcagaacattgtttttttttttttcaaaatgagaaaaagatgaaaacatagaggtaatgccctcactgagcatccatgtaaatatagattagtgctcagaaggctgaatgactggtggtgattttgattcttttcctttactctctggagaagaccagtttcatcagctaattctttgggaaatgaggcaaaagagaaacagtaaaaagcagactggctactgccagggcagatgacctctccatgagctgtagaagccaaggattctgtgagccatgatacaggacccagagcacctgcaaccaagagtcatctggctttaaaacatcagtagcactaagactgaaacaccctattgtgtgaaggaggaggtcagtttggaggtctggacaatttatggggccactggtagtggatcagtatttaccctagatacaaatggactttgggagacctctccacatagaaggatactctcttagcctagacacactggggaaggtctaggccctgctccaaatgatatgacagacttttaagactcccccatggaaggcttcaccctccctggggagcagaaaggggttgaaatagatggggggcaggggaggaggggaggtagagggaactgagattgacatgtaaaagaagcttgtttctaatttaaataaaaaataaaaataagctaaattgctaaagagttgttcataaacttttatttaaatgataaaaaagaaacaccctgttgtgaataaaagaataaatgtggtatttttttccttagcacaatgaagactaagttaaatggtaatatctgttgctacttaactatattgtttgcaagaattgtgtagctctctatttgctatgtatttgtttccaaagttggtctagagaagtttcctcaatgatgactattctccgtcaagacaaacactctcaagcattagtgaaagccaagagcagaaaccataaggcactgaagcacactgatttaatgagtataactagtcccgacttctgagctctactgcagagcccagaatgcctgttaagagataccatccaacttcatgcctaggaaacaccgttctttatctttctccttcttcaatacattttaatatacacttgaggtaaggtttatttcccactttttagagatagttcactgtctttgaaatattaccaaaattgatataaacattgggattttaaatctataaataagagactaattctctcatgaacttagattatgcctgctcctttgacagtctcatctcaacccatatggaaagggtttttagtgtctattcattgtacaaaatcatgggttatgtttttgttttgttttgttgtttttcaagacagggtttctctgtgtaacagccgtaactatcctggaacttggtctgtagatcactggcctcaaactcacaaagatccaccttccaagtgaggatattgtacttttattcatatataaaatgtactttgatcataagccccgattatcctctcttctcattcctactcatcccctttcctctttccaggtagtcccccttttattttcatggctcacaaatgtattttttgtatgtaagaggaaatgtgtggtatttatctctctgagtctgacatgtttcacttacatgacagtctccagttccacccattttccagcaaatatcacagttacattcttctttatagctaaataaattccattgtgtatatattcattatttattgtgagttggacacttaggctgagtctataaatttggttattgtaaataatactgtaagaaacatgggctcatccctatgcacagatagagttcttaagaggcagtagcagtttaacttttcttttgtccttgacaaagtcaatacagggtaagtcagccactcctaaagtcactaactgcctgaaaataaattctctatattaagtagcctacaagagccatagtgcttagtgttatcaatgcttaggtggagaatgccagctgctagactgaacaagatgatcttgttatacttctttcatttttttggaatgctaacagagaactgtcaaacaaatgtgaggtttgaggacttaacttgaatctagtcaggagatgatgtgtttgggaggctgtggtcagacagaatgacatgagggctggctagtattctacatgtggaagagtctgaagtagagacagcctggtgctgttccaaacacctttagcattttgttcaacataattggtatggcaaaaaggagccaagaagtccattcaatgttactttttgcaattaagaaattctatgtatctgttggttcaattcagttatgcacttggcttcatttcgctacagtattgagtactttggcatgtggttaatgagatggaatagctttaatttggatagatgttgtgcctatgggctgtcataataaataacataatattctagaataaacatttactcattattctacttttgtctctatcttttgctgggaattgaacccagggtcctgcacatgctagacaagcccttggccattgagctacatcaaaaacattactctacatttctgttatagatatcctgattcttttttcaacagtaaactgtgaaataaccatagttttatgagtctaacataataattatatagtaagttttttaggcctcttctattattttagaagaattggagattgttttctcttttaatcagctttttaagttaacactgtaaatctgtatctatggctctgaataattttcacaacactcagatttaatgatcacctatttctccaactattgtattctagtttatttctttctttttgaaattttaggctatttcatatgttgcttggtgcatgcttctttggcttaatggtcattataatatagtgctatagtaaacatgtaaaagcatgctaatacttctcgtctttagaatgtattgctatttccaaagtgtttgcactttccacagggacagatttagagggtggatccattttacttcttcatattcattgtgcaaaagtattcttccagggtaattgtgaaaaacagactttagagctgacaaaagaaaagaaagccacttttcttctctgtagcacaattaatttgataaatcatgagacatagcaatgcattccttctaatataaataaaatgctaatagaatgtgacactggctgggattgatgacagagatctttgcttctcaaatgcacaataagttcccaggcatgagcctagaaagacaaatattttatatactatttagataacctctacaatctctccagaagaaagattaacagaagcttaaaaaaaaaccctaaaagtcaccctgttttgttttgctctgtgtaaatccatagagataaacatttatatctcttagctatcctatttataaaagaatatgaacacagagccaggaaacattcacatgccagacaaacagagattcctctggggagattagcttaggatattttatagtttgcatagtgacaaaacatcacacgatctaagattttctcttaaaataaattctgtattttaataaatctgatcatcatgagcaaaaggactaacaataacactaataataaaaccactaattatacacacaaataaaattaaaccacaacatttggcatagcagaacttagaaagtcaagttttcttgttattcctaagtagaattttgcttctgttatgtcatcctttatctttttcacttgagtgaagatttgcagttagttaagagacaggatatggcccataatagcccacactaattaaacattaagctacaaatttgaagcagctcaatcaactacagtgagatgcaacataaatattttagaaagcactgtttgggcagtatatatctataacatatctttttaaactggtccaataataagaaatcaaaatctctccctctatgtctgtctgtctgtctgtctgtctgtctgtctgtctctttctctccctctctccctccctccctccctccctccctcccccctccctccctccctccctccctccctccctccatgtctccgtgtgtgtgtgtgtgtgtgtgtgtgtgtgtgtgtgtgtgtgtgtgtgtgtgtatgatacattcacatacacacacatacacacactgaattaaataatttatggtctggatcttttccttcacacacaacaataaaactaccaagattgataaaataatcatgttagggattttattcatctttgtcttggagcagaagtttctgcatgggtagtcaatgggactttgtccatagtgtaaataaagcacactgctaaacacttctttccaaaacaatcaataatgtttgtactggaaatacgtgaaagatgcttgggaaccaactaccactttgtgtggcatgaaaaatataagacccagagacagctatcagggttcaagcttcaagctgaagatcagagaagcaaagcagccaagccagtagatctttcctctacccaccagaaatgacaatcttgtctccacgaatcctcagaggcaaaatctctgaattcctgtttcctcctccttttattcctttctcttctcagcaatatccttctgtctccacctccctagtgtagggattaaaggcctgtgatcccaagtgctgggatcaaggcatgagctctattactcttcattcttgtgtcgaccagggtggccttgaactcagagagatccatcagcctatctcctgagtcctgggattaaagctgtgtgccaccactgtctagctagctagtatggctactggtattaaaagtgtgtatcactactgcctgatctctatagcttgtggctggctttgctttctgaaccctcaggcaagctttaataaatcacaaataatatatcaccacaattccctttttgtataatacaaaaagcataaggttacaactaacacaagaaaaactatacaataagtacattacttatatataatatatacaggtaataagttcatcaacaaattcagagaaaatactccattatctatgctatcttggtgagtccaaagtcttgcacctaatttgttttctactataatttgcattatcaaattatctttttatgtctctcaaccttatatactatacatttcttgaatttcttttctgaatctgataaacaaggaaagctataactatagctatctaatcttcaactccctcagagacccaagatggcaatgatattaactaagcaagcaggaagtgcaagcaagcaacttccaaaaactgtgagaaatgacaaaaacagctggctgcctggacagccacccaaggttcctctgcaatgatgaggcatctatattcagcctataggcctagaatctctgacagacttttctatgaagcaggattattgaatgtctgtcccaccttatcctggcaaggttttatagtcactgtcttttgtgtcctcctagtctaatttggacagcatactgtcagcagtcaagaaaagggcactttcttgcccagtgattacttttgccatgaagaatgtaaactccgggtggagtttcttcaatgcccgtcatcttctctgtagtagattggtgtctcattgtcaaaaagaaaaatacctatgttattaaaacatttcaaatgcagcattttgtagatctctgaagtgtttgaagacaacctgtctttctaaaatatacttctgtttgaccttgaaaaatacctaatgtgactacaagttcgacagtaatagttgactaattactaacctacatttccttattattctatagagctggtaaaaataattttcaagggctagaaatttgcattacattgttaaatgagctgtataaatataataccttagacaatactagaaatatatgtgcagtatgttttaatcaattaatttcaaatttgtatcaatatatagtatttgtatacaatatacaaaattcctatccaatgcaaaatatttaaaactagcagtttctttttacaagtagattcaataatctacctttttatctcatcatagctatatcctccctttttttcttttcagagtagattcattaatctaccacaggataaagtattccttttttttttcttttttttcaaaacaagaaccttgtatctaatgcccttcattcaattttcttcctggccataccaacaacattttgtaaccaatcaccctaaacaatgacaaatatccataacccaataagttttcaaaagctaccaccccacctcttgggaatgaggacatagtgttcttaaagttacttcctgctgtctgggatcctgaaaagaaaaatttgggttaattgtcaagtcctgggagaggtagctgtatcatttattgtccagtctctgcataatgggaatgtgctgagcttgtctcaggtcctggctagagtagtgtatgaggctgaatcatctcagctggcctcctaaaaattgttctgagcagtttgtaatccaaagctgatctttagttggtgttattcagcttaatggtattatcatagtcctggtgaaattgttattgcagtgtttcttcttcttcttcttcttcttcttcttcttcttcttcttcttcttcttcttcttcttcttcttcttcttcttctcctcctcctcctcctcctcctcctcctcctcctccttcctccttcctcctcctttgttttcttctttgtttggttggttggtttggtttggtttttttgagacagggtttctctgtgttaacagttctggctgtcctgaaacacaatttgtagatcaggttgtcctcaaattcactgagatctacattcttctgcctcccaagtgataggattaaaggtatgtatgacctccactttggcttagattcaatcttcttttagagacttcacagattgcattaggtcagattatttcttttcttggtaattttttccaggtagtttccccttcttctttggatgtttatgtccaaaagtcttaagttcctcaagatgtttgtttttattttcctgaaaattaagaaatttaacccttgcctaaccctaactttgaggaggttcctaatgtaatctttatcaatgttgatttatggtttctcctgaattttttgttttaatcttctaaagctcttcttccagaaccttatggcttcttactataggtattaggttctttaattgctctgggaagaaatttcctccaaggttacaggaaacgactgaacagaatttgggacaggaatcttcaagaggcccctcaaggcatttctcaaaggcaaagtattgccttgataatttcttgttgatctacattccatagtcagtgcttgcctttgccacacattctgcataatccaaaagggaggaacattctatttagattatatttataaaaaagaattgtttctagaaacacgctgtttattatcccttttcaggtgaccttttctggcacaatgaaaacatttgacatttcaatttttctttaaacctcttgaaatcacctctcttatccacgtatcatcatcatggtcatgaccttcaatattgattttatcttggatccaatcttccaaaggtgttgactttgcttttaaaggcctaattatccttttgcattgggcattagcattttcaaaagccatagtttcaattattatttttctagtttctgaatctgatgtcattctatttactgctgatgatagggtactgtgaattttctggcctggcaggttccctggcccttgagctccgacttaattattaacccatacctactaatccatgtatttccatgtggtcttcaagagaaaggtccgggtctcttactccattagggtcagaactagcctataagaaaccatagccaaagaccaatagtttcataactaatatagcatccgtgtgtttcattggggcagagaagggcggcaggacctacagaccagaaagctcacataacatgatagtctttgtaagaaatctgtgtgtgcttcttttgggccctgcatgacttttgtaaatgattcaattgtctttcctgcttctccaattctgtcccaagcattcaaagctgctgtaaagcataaactgaagagatgatcatcatagagacattgcttttctaaagtagcataatctcctccaagaatttgatcttggggaataccgcttgcttttagccttttgatcaatatccatagcctcttttctgaaccaggaaacccactgtaattgggttccagactatcagacagctttaatcaaatctatgcaacctatagggataaccctattacaaatggccacatgcttattgtccacttcataaatggtgaatagatgacatataagactactgcttctgagaaggatgagtgatgagcaaaggggtccagaccaggctggtgaaacccacagaaacaactgacatgaacaacggggagctcttggtccccagactgatatctgggataccagcatgggactgatccagaccccaggaacatgggtttcagtgaggaaaccttggaaatctatgggacctcctgtagaagttcagtacttaaccctagcataggtgtggactttgagagaccattccacataaagggatactccctgagccaagacacacgggggtgggcctaggccctattccaaaggatctgataaactatgatgacaccctatggaaggcctcacctccaggggaagcagaaaggacatatgataggtagtgctttagttgggggggggggttgtaggggaggaggagagggagggggaactgggattgatatgtaaaacaatcttttctctaattcaaaaaaaaaaaaaacaagactactgcttccttgaactttcctaaatctaacattgtcacaggcttccaagtagctcttatagaacctctttcacttggcacttcctgtaacgttactggatatattaaagttgtttctcttaagaccttagagtgttcctttttaacctgaaaatgcaatgctgaacttgtttttccatgtaattcctcagtctgggtttgaatagctctataatctgctttagtaaggttttctaaggcctgcatcttaactctcatatcaaccaacttttttcgagataaaccaaaaattatcaaactgacaacaaggattatcaaaatgacaattaacagtgtgtcaatcccagttaagttgattaccccttcatttaattgtcccattttaaaatcacccattatgtaatcatacggagacctaattctctgcattttaatagtgttttccattttttagtatggggaaaaaacctctcttttttttaactaatcccttcctttaagaattcccaaatctgtggacaatgtcagtggactatgaggcatagcatgtctgaatcagagaactagcttgtggccatgaactgagagtttcagcccaaggaagggggctctgagaaaagcctgaaagcctcctaagttttgttggcagctaaagactgtttagaaaagtgcaaccaaaaaatcccatgcttgctcaaagatttcagaagaaaacctagctggtcaggcaagggactcaggcaggagggactcaggtcaaagaccagcctacagctcaggcttgggcctgggctagtggctggtggcctcttttctgtgaattcgtactttaacattgggcaccaattatagcataaaaaataaaagacccagagaaagatattgaagttcaagcttcgagctgaagatcagagaagcaaaacagccaagtcagtaactttgagaattatcgagggaagaaacttaaaaccttataggcttttctctatcacctagcttattgcttgctttcctcatagcagctgccaatctttaaagatcacctctagtttttatatgcatatacacagtatatttattattaagtcaactctgcttaaaagaatgcaaatccagtggcatataccaattcttcattacactgcatcctgttactcttataggtggtgagagggtgtttcaaattgcttgtgcagatctgttgtgttgagtaaatctcaaggttgaagggtttctgtttccagataacagaatacataattttatttttatggattacaggtggtttttatgagcctatgcaaaagcttttgggattgtggacttgtagccttggatgacattaccatacaactgggaaactgccggtctccaggtaagaggactattagtcattctagctgtttgtctctccaccctatgacggacatttccagttcctctaagaacctcatacatttaatccatgctattctgtcccttgttttccttaatgcacacattctcacagaactttgtagtagattctacaagttggaaaggaagactctggtgttctgtgtggctttttatgtatggcttggtttcctttcttcattgtaaggaaagttagcaatgcctccctgaatgttggggacaatgtacatacattccccagcttatgaactgcttccaagtaatgcttaaaaacaagtgccctctatcttaactagtattataattatcattgtactttttagagaaggcacattttcaagtaatattgatggcattgctatttcaaaatacttgtgagaccattaaatttttaataaagctgatacgttctaagtctaagtggcagtaatagaccctacagcagcaacaggggacataggtttttgctgctgcttataacatcctaatggttatttgttgttttatttttcagttcctttaaagttttgtgcaatattgttttgatcatatttatctctccaactcttcccagaatgaatctctttcccctatcacctaactttgtgttttcaaacccttcaagaccaatttgtgctgcctaaaatattcttagatgtatgttcttccactgaaacatggtcaacttgtgaagggctacattcttagataaatctgatccttccttttccagcagctatcaattgtgagggggtaggactgtgtacctaccacccctctgcatgctgggattttgtcttgcttgaacttgcacaagttttttgcatgctgtcataattgttgtgagttcatttgtgcagctgtcctgctgtgtccagaatacattttgttgcagtcatctacagacactggctctttgcacccatacttccataatgatccctgggccttgggatgagggtgcagtggttctttcaaagacctcagctcaggcttctatacctcaggaaagaatttctaaatgaatgagaatcgaagttggaacttattaagaaaagattttaacacagatttatgttctagtgtcaacacaagatgcttaggaaaaggacagtaaacacccaagatatgactgtagagcttcccaagagagagttttcatagtcatatatataattttggtggcttcttgagttacattggtcaaagtgtttctaaggacttttcctttttatggtgaaagagataataaggtggcttctgctgtatcctgataaacgtaagggctataaagaagacaaaactataggccacacgttgatggattccttactatattacttgcaagggggttgagacatattttgtctgcaaaccaagttcataatcttgtttgtgagattctcagaacatagcatatttgcatctaaacatggagtaaggttaaatttaagttacatacaaggctcactgctattttcacagtattattcaaaatggttctagacttgtgtcaaatcctgtactcttggctggcttgagaccagccagactccaaaatgagcttccccatccatttcttcataatttcccctttatttctatcttacttcagactaagcattgataattgagaaactaaagtcatggtatctagtagcatactagacatggtgggcaatgagtaaatagtgcatacctcaataattctcagtattcatctgtttaacaaatagccaaagtatagtaacagtctatttgtggagactagttgaaaactgaattagggctggtggcctagctcagcagcagacacttacacagcttacacaggttctgtgtttactcctcctgatataaaatcaatttaaaggaagacaccttgctttcaggcccttggattctgagtccttggaaggacaataccaataagagtatctacactcaagccaaagaaccgggaatggggcctcattaattagcactgtatataaaacaaaacacacacaaaaaaaaccagaatatcattgaaatttttactaaaaactatggatgtggggaggtgttagaagcaatgcatctccagttttcagagctttgtaattccactcacacaaattcccaagttggggagggggtgtcttgttcaaagcaacccaatatttcagatctagatttctgattctgtgtcatgataggacccacaatggagcacagattagctggaggtaaggcttggtaggccacctgtgagggtctgcctctccataggcttgacatatggccagacacctctcagacatgcaaagtgggcttgctaggagccatgagaatatacatattcattaactgtctcaccaattacaacacctgctgtttccttgcagagagacttccacctccacctggagagtgcactttcgatcaagatgaatgtgcctttacacaggagaaaagaaaccggagcagctggcacagggggagaggagaaacacccacctcttacacaggacccaagggagatcacactactggggtaggtgagttacgccacatggtgctgtttcctaagaatctaccttagcatactagaggtcatttaccacattttatgtgtgcagcttcatgtcttgtgactagaatgagctacacatgagatttttaataggtttattggaaaatcatattttatgtttataatactgattaatgtatattgttgcaaagataatttagaactgggtttaaaaaactaaagggaacaaaagttgggggaaagaaattaatcaaaattggagctgaggtttagtatataaatgtacgagcagattgggagcaggcagataaggccaactctgtgctttctatagctgaaacaaggacagaaaattcttctgtgaattgtgattcactgtgttgttgtgataacacatcaggagctgataggtggaggtatagataatcaggtgacacattatctatccactccaccagacaaggtcttgttcaggatggcctagaactcaggatcttcctgcctcagcctcctgtgagctcagggatgcagacagatatatgccactatgcctggctaaggagtatgttttcaacacagaatgtgtaaactataataggacaaactcaaggttgctcatcctgttactactgtatatcagcaagtgaaaacagtcagtggtaaaatatgctctcgttatcagttaaggcacaaccttaaattcaaagaaggaaaatgtccctgaactaaattctcagagatccttgacactaagcttcagtgtccataaagaaaagtcaggaggatgtggtaggttataatgtgcttaccttatgaccaacctcaagataaatctatgagccagtaccatggatcaatatacgatgtatgtaacctttctactgaattagacaaactcagtagaattcaaccacgaatagctttatttttctttccatcattcacttcagttatatcctaaagacttctctccccattccttggcaaatcccttaactcccagttctgctgaggtattagaacagtcataattcaggcattttaaaaagtatagtcctaatttaaaaaaaccacttccatttctcattcaatcaaaatgcttctgatctctttagcttggccttgactccttgtctcaggaggataaaggagacaactgtatagtctttagtctttatcttataccctttcctgccttccctgtttgtcagggaaggtagaggaagaattaaaagccaataactttaaaatagttagtgctcttttaaattctctcttggctattgactgttccctcgttgtgacagatgtcaataatggccaactggaacttctgcagcacaccatgcctggcagtgtccactctgcctaaccctctgtaatcagccatttgcacttgttgcctccacattaaggtacacacctctatactgccacccaagtttttctgaaagtttctgctttgtttgaagagcaatatttcatccaccttcccagagtgtccactggcctcagaaactaatgcactctcacctaaaatgtgtcacccagtgctactgctgccctttttctatggtgctttggtagactcaggaagattatttcctcagagaagaatattgctaaagagattcagcactggccaaaggtagaccagatatccacttttggtattgaatagtgattctagagaattatgagaccctttaggcttcatctggaaatgcatcagaaagtcacaataactagaaaccatatatatgatgacactctggcaacataaaacagaaacagaatcgaaattgatgttaaatggacagggaatcctttgctgaactttgaaacaggaaatgatcagttcaggtgcattctgatgcaagggataaactatataatcaggggtctcttttctccttccacttctctgtgctgagttttctggattggttccagtatcatccagaatatcctatcatggtaaaaaattggctaagcaaagacagaacactgaattttgcagaaagggataacactgatgaaaatctccaaactgagcccccccttttttttgaaaaatatgtattactatagagccctgcttggcctgacacttgctattagacaaggctggccttaaatttacagagatctaccttcctctgtctgcctcataagtgctagaattaaaggcctgtgacactatgcccagccaaactaagctttattggctctgaatagcaatgtcataagggctattataagtactatataaccattgaattcccacagtacttagtattatgacttattcaagatagatatgcaaaaatctttatggtttgagtgaacaaatgcataaatgagtgaatgaatgaataaatgaaatcctttactgaaacatataagaatgctcattatttagcaatacccatcacagtaatatacacctataatcccagcactcaggaagctgaggcaggagtattacaaatttaaggccagcctgggtcacataatgagatccaggccacaatgggctatattccaagtcctgtctcaaaacaaaaacaaaaacagcaaaaccctctttagaaaaaaataagattgtgggaagatactatttttaatattcactgcagtatagaggagccaatcaatttagctcatctgttatgagattcccccccccaccccgcaaaaggtttagagtttttattccttttatgcaggcataaagaaggctttagttagaggaatgaaaagacactatggaaaataagcataagatgactttacagggaggtattctggataataaagatcatggaatgaagacaggactggatcaaagtactaaatagtgaaggagccattcctgaagagagcaaagggaagcatccaggccagggtagaagagacccataggctttggagttgggaaaacccaacatatttcattcattgggtatggccttaagaaagctacttagttcccagtttcagctttgacatctagaaaacaagaatacctacaactacctactcatttacataatttcaagaagtggtccaagatcaagatgtcctcatggttgctttcctctggcctctctggcttgcaattggccatcttcttgctatgtctacatatggtcttctctctgtgccaaagagacacacatccctggtgtctctttggttatgacacttgtattgaatcaggatccacccaagcaatcctctttaaattcaattacatttttaaaggctcagtctctaaatgtaaccacactctgatatactgaggttaggtcctcattgtgtgtgttttggagagatgcaacttaacccatagcagacttttttccaggaatcagtgtcatgggctgaatatcaaaggagaaggaaaattctttcaagttaaatgagtggcaatccaggcctgctcctgctcctcgtggctttatgctacagtctgggtttgtctgactcatagaacatgttctacctcctcctcacacattcaaaactatgaaaatctattaaaaacatgtgcaatatacattaaataatatattccagtcctttactggccatcattaccgagctatggggacatatgttaattaacttgggatggctttgtttgaagatggtgtggttgtattttctttgtctctttgaaaactttaaaaaaaatgtttcaactggctagggtgaaatttcacagcaaaagaatgaatgcaaatgtttcttagtgaattccatatttattctgaatgaatactagatatattaaatgaaagtctctggtgcacagtgtagcgaatgctgattttaaaaaacaaatttttgttttgttttgttttgagacagggtttctctgtggctttggaagctgccctggaactagctcttgtagaccaggctggtctcaaactcacagagatccacctgcctctgcctcccaagtgctgggattaaaggtgtgagccaccaatgcctggcttaggaactttaagttacaatactggccataggatactgtcaaccaggagtcccatgaaaatggagcctcagatgtgacctgatatggaggtagtacacttaaggccatgagtccccataccaggaatgggaacaggccatataacaaggaaattatccatccatacaacgatacatccttggcttggccactgctatgtccaattgattgcttgagatagtggggacatctaataaaccatgttgaattatgtgtcatggccatcaactagagagcaaaagagaaaagtatgttttcatacactcccaccctcactggcctagacaactgactccccacttctacctcattcacatgcatgcagagaaattctgcaaaggcttaagctaagagtgactgatgacatctctacattgaagaccaaaagccattggtatctgccttgggcccaagataaggtgtctaccaaagtgcttttgaatcagtcctatctcttcactttccctgcttaaagcctaccagtttacagttgacagaactcaaacaaaggaggaaaaaagaaagatgggtggggaaggggggatgcaaacctgttttatagacagctgcatgataaacagtcaatacatgtccactaaatgaaaagaaaagctcagcaaagtcacactattattatgtcaagctgctgtgtgtgtgtgtgtgtgtcagaatcaatatatcatctcaggttaaataaagacaagccctgtgaatgatcttcaatttagctgccaaatgggtcaaataatgttgatttcccaggaatggagtgtttgagaagtagaccacctgttctgactcagtctctatccatcctgtccttgcacgtgccttagtcataaagctcttagtttatagttctgtcacaggagaggtgcagatgggatgaggctgagtaaaaaaaaagttactgttcttagaaagaatcaagcatttctcttgagcaagtattcttgaactgttagggccattggttaattgccagaatactgataaagttagttttgatcatttagtttttgccagtgttcttgcttttatggtgatttttagatcttcagaggtgcttattctgcttctctggaacccttctgaccacctgcttgctttttaattgattcaagtacattggtgaaattctctacccacatatttatgtatacatataaacgtgtgtgtgtgtgtgtgtgtgtgtgtgtgtgtgtgtgtgtgtgtgtgtgtgtgttatagtgctgaggattgaacccagggccctatacatacagagaagagtgacattattagtctatatcccaacccttcattaaactacagtctcttatatgataactccatgttatgggttacctgtttccccaggtggaatttctctgtgtatacacacatataccttaaaatctataataaatttgactgaaatctagatgttgtaaatgaaaaatcacagaacacttctgcgatggtgtttttcctctcagacgataagaactgaggcaatgtgaggtggccgtggctgtgctttcttgggcacccatctggttctgcctacagaccaggaatattttccaagaatggagtctggagtttatttagaaattatcatctctaggatgtactaaacttaaactttgtctctagctggtgagatggcagaaaacactactttgttttgcatttaactttatgtctcttggtcttttcaagttaagaatttgatgaatgcctcaaaagaagatggcctagccatatgtcttctttctgtccctctttcctcataaaacgtgtccctaccaactcaactgcttgagcaactttgaacgctagttaccttctgctcacatcagtaggtctgttggtgtctctgccacaatgtctaaagagggaagcagtttggagaatcttgagttcgttctgtggaccttccattttctctggaatctgttagttcctcaatgccttggagcttggaacagtttctgatatctctgagacaggtgccatccctattagatcaggattgatcaagccgatttgaaaataaaagaaaaaggagagctatgttgacagaagtgggttcttctttaagcggaacaatgaagagaggcaggagtgaagacagtgcacagagatgcagggggactgagggttttataaggcagaaaagaaactcttccagtggagaattcaatccacagatggaattttccactgtggatcgaatcctttgcagtctcatagttgcaaatgtgaacagaggttgaaatgctgaccttgtcaggagcttgccagttcctaattccctgaagatgtcaagagcctgcaactttcctgtcagtttctcagctcacctgaggcttttaagtcattatcccttcaagaccctgaatatttttttctgtttgtctatcctaagtttcctctaggcatactagaacagtttcagtcacacactagagccagaagaggctgctctgatatcaggcatcttctggaacatcatttatttacaacagattttttaataatttatttttattttatgttcattggtgttttgcctgcatatatgtctgtgtgatggtgctggacctaccggaactggtgttacagacagctgtgagccgccatgtgggtgctgggaattgaactcaggtcctctagaagagcagctagtgctcttaaccactgaggcatctctccaggccccacaacagattgttttgctcagaggttaggagcattgttgtgttctaggctacaaacaaaccaatcatattttaaaaatattttatttattatttgacaacctcaaacatgtatataatgtatcttgatcatatccaacctaaatcccttttcctaccatcctcagactctcccctaaggcatccccttcccaccttcatgtccttttccttttcttttttttttttttttgaaataacccattgagtctgcatttgcatgggtttggggtcacctagcacagcatgggcttattagtggccacatccccaaagaaaaatggctccctctcccaataaccatcaattgtcaatagctcctcaattaggaatggaatataatgaatctctccagagtgttgattggcttgatctaatgcagatcttgtgcagatgactgtaggggaaatgctagccatgccctcttaggggctggcacaggtagcatttcccctacaattccccttttagtctaaaagaggattaaaatttaacattgtaaattatctatcattaacaatcctaatggtgaattacatgaagttataataataatgtcgcatcttaactataactattccaactaaacattaaggtccaagcttgaacacctttttatttagacagaaaagaggagaggatgggggaagtgcttctgtgtatgtgtttgtcttattggatgataaataaagtactgtttggccaatgaggcagcaagttaggcaggactaggagtcaaggaggatcctgagaaatgtagtaaagaagtggtgatccaggcaggaagtgacatagcagagagactcatacataagcaaagacaagaaggaagtcgtctttttcccctcttcctcctgctctctgctctaagctgccatgtgatcccgggatgaggatgccagtgaaaggtgtcctacataagataggtcatataaaacatatagatttatgataattaagactgagctagcagatgagaaatcctagccattgcccaagctgcatttgtacctaatataaatctctgtgcgttacttgggaccttaatgtggcagtgggtggaacttgggcagtctggcagaaagcacccacgtggtgggagggttcaggtggccactggcagaaagacttattgtaacagatgactatggatgatataagttcatgagtacagtggccatgtgatgcctagaagacagcatttcacagcacccctcacatccttgattttttatattgattctgccatatccccagtgtgtcctgactcttaggaggttgattcagatgacccatttggagctgagcattcaacagttacttattctcagtatttggatcagttatgagtctctgcattacccactgtcctatacaaaaagaagccttttgactaagtttgagagcagcactaatttatgggtaaaaacacaaatacatagaaagcagtttgacatcatgtacatttacaaaacaacagtagtaggttcttccctaggacttatgacatccccaatcatgggtttttgaccaagtttaaaataccaggcataaaatccctcatatggagcagatctcaaatttaatcagaaagcaattgcttacccttctaacagccatgccactattgcacaagtaggtataccttgcctagcaggtcagtgttgcagcatgtaggatccagctctggtaagtctgttgatgaattttctccccaagcagcctgcataaagcgcatttcagcactgtaaaagctatcacatatgtgctactactccctactcccattaagggcctttctgctcccctctctcatgtgcccttctagccttttgacctctaaagaaaccccaaattaaacacacaaacataaacatttgaaggtaggatctatgtatgagagagaacatgaagcatgtttttcggagcctgaattacctcaccagttccacacatttttctttacaattgaataaaattccattgtgtagatataacatattttattatctattcaattgatgaacagccaggctgattccattttctagctattatgaatagagtggcaatagacatggttgggcaaatatctcagtaatacaatgtggagaccctggagtatatgccccagaaacggtattgctgggctgggttatatagtaatcctagttttatttattaatttatttacttgtgtgttttacactttgtattttcttcccctaatttcttcaggggtcaaatcatgggcataagaaaagtgtacacagttcaaaatgttcattagtagtggtcattattgcatatgtgtatacacacacatatgtatgtgccaccaagaacatgtggaggtgttcattttgctcaggaatgtttagactgcaggattcttttgtgcttacatgtgaattttaattgtttttctatttctgtgaataatgtcattagaattttatgtgtattgcattgaattgtagactgcttttcaaaaaataaatttatttttacatgtatgggtatttttcctgcatgtatgtctgagcaccatgttgtgcaatatccacaaaggcccgaagacagtgcattgaatcctctgggatgagtttcttatctaccatcttacccataagtcccccctgatcagagtatttagaacgagatctttgtatctctgggctcttcagactataagcatttgtgggtattttatgcctctggccaaaggtcttgttatatctgagatgatattgcatagtgtactattctttgacaaaaggtaataggggaataataaaatttacacagacaccggctataaacagtggcccaacagaggatgccactatttgtgtcttcccttttgtatctccccatcctgaggaataaataccagggacattatcttaagaaaaatacctcaactgtatttgttaaagcacagtaaggaagactttattcaaaaccattgtggtaagaaccagcatagtatgatttttcggtggaggggaaagacaaggctcaacctgaatacaacatggccaaggaggaatagagaaacaaggagctgcatgagattagggcatggaaaattatcaggaagaaatgtcaggggcaggaaggattctggatgaactgacctaccaggattcttgctgaaggcagcccaaggttatcatgcatcacctctgggatggtggaaggtgaaagaaacaatcacatagctccttgattagatatcaggggtggaaagctcctgacttggaaagcctcttatgagataggactttgtgaggaaacggtaggcctagggaaatatttaagagctaaatttgggtcaaacaaggatcattgcaaactgtgagtattaaagtactgcaaatggcttctttttattcaattgtcaaagaaaacacttagaaaaccatatcatattatttaaagtgacttgtatagttaatagagttttgcttagatagacagcactgaaaattttctttaatggggaatatatcctaaaataatgtattttgaaatttttcatttactcaacaaattaacagcaattcatagatttttaggatactggaggtaggcagcctattaaagatcagttaatgcaacatatacattaaagattatggaaatccttttagtttagtttttaataattatttgctgttatccttaggtagaaacattaagctttcttgttactaagtatacactgtaaacaataatgaattgcattgggggaaaaaagagagagctagtgcctgcatgggtgactatggctcctttaaaaatatagataataagataatggtaggaacaactttaaaaggtgggacttcctattttatacattggaaagtgttccactgagacttggggccagtagcataatgtgtttctccttgatgtctaccatgtatgatggccacagggccctttttaaatttttttattagaaaaaaaccttcttctacatgtcaatcctagttccctctccctcccctcttcccctgcctcccccatcccccatcccaacccctttctgctccccagggagggcaaggccttccatgtgggatctttaaagtctgccatatcatttggagcaggtcctagaccctcccacagggccctttttaaattaacataatgcattctgggaattttgaagggcatgcctctatatgtagactgcattctaccttttcacttcccatccttaaagcctgtcaatttatagttggaagcgcatacacagggaaaaagaagaaaggagaggggcatcaaagctggtttatagataactgtattaaatggtaagtcaatataaattcatcaaataaaaaaatctcaaaaaaaaagaaaagaaaactccataaacctgccaggtaattttgtgcctgtcaggatcaatatatcagcagcagcagttctaaaggagatatagtttctgccttcctaaaggacaacgcagaaagacctttccatattctgaggttagcatgtatagcctagtagaatgacaaagcatccagcagtgaactgtccctgctctttgctagctgctgagccttgggcttgattacatggcctctgagtttcctcatatataaaccagcaataatggttaatgcctattagcctcttagggttgctgtggtaattaactgataatacataaaagccactgaaacatgtggtgttgttatttctacaattcgtgaatcttttattgaatctgatgtctggctctgtaatactttccaagagtcgatgtttaatgccatgtgtgcctctataaagtacaaagccattgcctgcaaccactaataaacttccttggttaaaaaaaaaaaaaaaaagacttggtagagttattaaaccaaaattctccctaatcacattctaactacctccagtatatcaagttataagaatatggctatttttaggtttgccagtaatacccatgcaaataaaaaaaaaacaaaaaaacatagccagcatgccagaaccattattccatagatgtataactcgttttctgtttctatgctaacatgaagctgcttgtttgaatagatacatatgagtaataaaactactaaaagaaaactattacaagtaaactattaaaaggaaaatattaaatgcaagtagcatatgatagacaaaaagtatagaatatagaatctgaatgatgaaagcttggggaatccttatcaatgaatgattgtactaaaataacaacaaagacacgctccaaaaaactttagccccaccatttcactgctgttaaaagaaagcattctgtgacagatggaatgtcactggcatcaaggtggcatggactctgcagtatttatttctggttcctgcaccatctgcatgagtagctctgttctacagaaacagaaagtttcccagcacagatgccactgtgtttcttatttacaagacagtgacagccagtcataacaaactttccagggttttattgccatttatatgatacaaggctatcagaattctttgtaagcatttgttttagaagggttttttaatagagatttgtggccaaatgataatgaataaataaaccaaaagataactatccaacttatgagaaatctccccctccccccaccccaccacccccattgtctcagctcctggcccactgagtctaataggtggactgccatgggtctttctaccccatccctcctcctcccagaaaaagcagcttcatttggagttctaacaattccaaagaaggacaccatcactctctttcaagatgccctttgatgtttgttctggaaattaaattctcttccaacatactaataagtaaaagtaggagtcttctttacttctaagaacacatatcaaagaataatttatttatagaaatgtcctcttaaatgaaaactatgaatttgaaatgtgggtttggtttctttgtttcttttattttgtttgttgaggcaagatcttagcagccaggtggcctcaaacttctgatctggcaggagtatgagcatgtatgtgtgtgtgtgtgcctgtgtgtgcatgtgtgggtgtatctaattaagggccagtccttgtccttaagaatctggatacctgacacccaggtatgtaacctagctgttccagtggtctacattgtctatgaactctgcagggtgctgcagtgttcccacagtgaggtttccacgacagtgtctgatatcatcagatcccactttcccagagaaggtttttgcgaaaagcctttaaagatgtggtaagatgcttgaaaataccacaatgaaacccattattactccatattctgacctgaagaattgattgataaaaactgctaaaatgctggacatctggtggggttaactggaatgcccctgccctattaatacctcaccctcatttcttccaaaagtccttttaaagaccccaagagtagcagcttgatggtgcctgttgcctgggccctttctccctcttaagctctcacctgtgactttatagtaaatgtctctctgaaactcaccttagtggtaagagcttggagccattaagcacatgcacgtgtctgtgcagacaccatccccatccacctccataaaatttccaccttcttaaacagaaactatactcattaagtactaactctttgtgacaggctttttatattattattgttaattaagtttattcatttatcttttatcccaactgcagcttcctctcctcccattccctcccccacctcttcccaccccactcccccaaactcgatccactcctctgtttctgttcagaaaggggcaggcctcctatgggtgtcaacaaagcatggcatatcaagttgaggtcagactaagctcctccccttgtgttaaggctgagcaaggcaacccagtatgagggataggttcctagaagccagccaaagtattagggacaggccctggtctcaccactaagcatccaacaagcagatctagctacacaattatcacacatatgtagatgacctaggtcagtcccatgcatgctccttagctgttggttcagcgtacattagctcatgtgagctggggttagttggttctattggttcccttgtgatgaccttgacaccccccacaatccctccctttcttcaaaaggattccccaagttccacccagtgcttggctgtgggtttctgcatctatttccatcagtcactggatgaaggctctcagatagataatagttggggtagttagttaccaatctgattacaggagatggccagttcaggctacctatccactattgctaggtgtcttatctggagtcatccttgtagatgtgtaaaagttgcccttgcagccgggcattggtggtgcatgcctttaatcccagcactcgggaggcacaggcaggtggatctctgtgagttcgaggccaccctggtctccagagtgagtgccaggataggctccaaagctacacagagaaatcctgtctcaaaaaaaccaaaaaaaaaaaaaaaaaaaaaaaaaaaaaaaaagttgcccttgcactagatttctacctgattcccaaaatgctgcccccatcaagatatctctttcatccattctcctccatccactcctccaacccaatccctcatgttcccatccccacaggcccccagtctgcccaggagatctcttctacttccccttcccagggaaatccaggcatccctgtccccctttggaccttccttgttacctagcctctctggggctgtggattgtagcattgttatcctttacagctaacatctgcttatgagtgagcacataccatgtttgtctttctgggtctgggttacctcactgaggataatttttttctaggcccatccatttgccttcaaatctcctgatgacactgcttttaacagctgagtaatactccttgcgtaaattaccatattttctttatccattcttcagttgaggagcatctaggttgtttccaggttttgactcttgctgctatgaacataattgagcaagtgtcctggtggtatgattgagcatcctttgggtatacgcccaagattggtatagttgggtcttgagggagattgattctagttttctgataaacctccatattgattcccaaagtggctgagtaagtttgtactcccaccagcagcagagagtattcccttgcttaacatcctctccagcatatgctgtcgttagagactttgatcttagccatgctggctggtgtaggatggaatctcaaagtagttttgatgtgcattttctctgatggctaaggatattgaacaattcttttagtgtctctcagctatttgaaattcttctgtcgagaattctctgttgatagctgtttaccccatttttaaattggattatttggtttttctttttttttttgatggctagtttcttgagttctttatatattttagagatcagtcctctgtcagatatgggcttggtgaagatgttttcccattctgtaaggtgccattttgtcctattgacagtgtcctttgccttatagaagcttttcagtttcatgaggttccatttattaattgttgatctcagtgtctgtgctgctggtgttctatttaggaagttgtcttctgtgccaatgagttcaaggctctttcccacttcctcttctatcaggttcagtatagctagatttacattgaggtctttgatccacttggacttaaattttgttcatggaaatagatatggatatatttgcattcttctgcatgccaccatccagttatgccagcaccactttttgaagatgctttcttttttccattgtatattttcagcttctttgtcaaaaatcaggtgtacataggtgtgtggatttatgtcagggtcttcaattctatttcagtgatccaccttgtggcaggtttttttttttttttaaacatggctaaaggaaataattggcacagcaaactcaaaagtcatgaatttggaaaagggacaggtagggagtcaggggtggtaggaaggtattaacagatagaaggaagataagaaagggttgggagagtcactagacttcattgtgtatgtataaatcaccaaagaactagcctgataataataataatatagtgatttggagggagactttttagcagttgtttttcccaagctttgatgtttccccctcttccagtctagtgaaaatagctcactgctccttccacagggcctcatcacacaggctgccaaagccccttcccaaccctttaaaagagagccaagagcctagaggagcagctgtctaccagttaaggattatgagaacagtgtgagtctgcttctcggggcatcacagttgcctcacaaacaacagatggggccctgagcaactagtaaatttgtgggactcctgcatcctagatgtcagacagtagcctacagaaagaaagaattttatctccactctcctcccctggcccccgaaacaattgttcataggaaggaacccatgatctaggcctcaagcatcagttctgtgatatcctgctccaccctaagctttcgttgctgagacagacagagcttgaagctgtgacatggaaatgtcagcacactcagcttttccctgctctccaaacacatgtgaggccgactggcctctgtgaagttctctgctggtttaaggaaaaggaagtgccatgagcaagtcaagaagggagaagttatttgtaattgagaggaataactagttcatgcatggagtgggggttctgatcagctagcaaagatgttaaaatcattatttaggaatataagttggtctagattcctttaaatcctttaaatcctttaaatccttaattcctttctatatacatgtgtccttaatacaaattctatcctgacgtgatttgcaaaggctaaaattattgaagaaagggagactgaagttagtatcctagaaagtcactctccttccaggcaggacccacttccaaaaggagcacagtcacatgggtcaaacagtatgggtttcctttcatattcttcagcactgtgtagcatgataaataaaagacccagagactgatattgaggttcaagcttcaaactgaggatcagaaaagcaaagcagttagtcactagctcttacctctacctcagctcagaccaaaggggcgattctcaaactgctcccaaattcactgctcctcagattcactcagactgctatgctctcctcagagtggctagagactaactctcagacttaatgcctaccttttatacctctcaaatcctggcattaaaggtgtgagctctgattcactctccagtagcccaggatggtcttggactcagagatccatctgtctcttaattctgagtcctgggagtaaaggtgtgtaccaccaccacctgatctctaaagcttgaggctggcattgctttctgagtcctcaggcaagctttaataaatcataaataatttatcaccacagcactaagcccaaagctctctggaactggtagtcttaaataagagctttcacctgacacccaagcgatacaggaacagaaagcagagcaggctgtagacgttgcacctataagattgtgtggtgcagagcaaaggagatgaggcgtaggaggctgcactgacgacagccctgatttagttaaagcccacctggccctctgggaagagcctggaacagagtaatagtttccctttcaatgctgaagaactagtatcttgtacccaagaaggaaaaaagttgaaccaatactcagggagtgactgagagtttgttgatcttgtaggacctcagaatggccatggccaagaattatcatcactatatgaacgataaccctaggccatctgtcactcatgatgaatccattgcttcctctcttatctctcagcccctcaaagttttttatttgtacttgctcagtgaatgtatttcaaggacaatgtctttcctactggagtttcatccctaacaaggatcttttatgtgggatttcaagtgcctttggagaattccaaagcaaagaacaaaaattattttcagtgtgcctgtctgtatgtatgtctctctgtgtgcgtatgtgttttattattgcctttaaaattatttcttgagatattttttcttgttatacagctcaggctggcatcaaactcacaatcctcctgcctcagtttcacaagtactaggattgcaggtgtttactaccacacacacctaactcacgatgcttaattgagtacgctgtatggtattattgaaatctatgccactaatttgcacataggaagcacagaactccttggtatatggtttgatgacataccacatccattttcatttcttatccttgtttttcttttttttcagattttttatttgaattagaaacaagattgttttacatgccaatcccagttccctctccctcccgctctctcctaccaccaccccaaactaaaaccctacctatcacatatcctttcttctattcttcccctgactcaacctttctgctccctcattatctctgcatcttaaccttgtttttcgtggaactaaattaaacatacttttccattaggattgtgtgtgtgtatttgtttacattgataccagcttaagtggcacagtgttgtagaaaataaaatacaataaagttttcctggattgctcaatgtgaaaacacacccaatgtagcaatttttgtgccaatgaacaacgaaagtaagattatcatacatacagagtattttttgaaacaaggtctcaggttgttttttttttttttaaatatgatttcaagaattttttgagactaggtctcaagtaacccaggctagtctcaaactcactgtgtagtcaagtatgaccctcaacaccagtttcttctgcctctgcctccaaaaagctgaaatcataggcgtgcatcactactccaggctttatgcatgttcatttttaaaaatacctcagatgatttggaacttatttgagaatatttgctttactaagactgtgattttattacttctggggtttgccttagagcatctgaatccagatgcctttctgattgccaagagcctcatacattctatgtgaacgtggtggagccatgtgctctagaaatgatcagacttgtttgtggcttagtgctatgagagaaaatacgctcatctatcccctcacaaatacttttgagtgctgctctaggagctggggatgtggtgttgaactaaacaaggaaactctgtgcaatagagaagagggaaacaaagattaaagaggagaaaattacattacccgttaaaagaaaattaaatgttacagaagcataataaattaacgtataagggacaaggtgtgctgaagaagcaagctagaagggggaagagcaacttgaaattagaataggtccaaggaaaggtagcatctaagcagacacttaaagggggaaagagagtgagacctgagaatatctccagaagagccagggttagcatatgcaaatgcctgaggtgacatccaggaacagtaaaatacacctaatgaggaataacaaaaatagcactgaaagagtggtgaggggcaggttgttcagggccctgaagcaatcctgggctgtcaacctagactctgagctaaactaatggaaactttaaacaaaaccatggtacaatttagcttttagggtttggaatgatgcccagtagatgaaagcccttgtgaaatcatgaggacctgagtttggatctccaggagccatggctgtatcagcatcagcatctgcaatcccaacactcctatagggagaagcagagacaggatgatccccagaagctcacatgacctgacatgtgctacagaaaaacagcaaataaaccctgtctcaaacaagatggaatatggaccaacatccaaagctgttctctgaccttcacacaggcatagtggcagacgcagactcacattgatacacacaactgggtgtgaacacacacatacacatatatatcaagcatttagaaagaccgctataagcattatttgtaataaccagaacctggaagcatcctagatgcccctcaactgaagaatggatagagaaaatgtacgtttacacaatggaatactactcagaggggaaaaaaatggaatcttgaaattctcaggcaaatggatggaactagaagaaaccattctgagggaggtaacccaatcacaaaaagaaaaaccgggtatgtactcactcatatatggatcttagacatagagcaaaagattaccagcccaaaatccacaccaccagagaatctaggtaacaaggaggactctaagagagacatacatggtcccccagagaaggggaaagggacaagatctcctgagcaaattgggagcatggggggaggggagagggagctaggagaatgagaaggggagaagaggaggggtgaggaggacatgagggagcaaaaggttgagtcaggggaagaatagatgaaaacaagataagagataccataatagagggagacattttaggtttacagagaaatcaggcactagggaaatgtctggagatctacaaagatgacaccaactaacaatctaagcaacagaggagaggctaccttaaatgccctcccctgataatgagattgatgactgacttatatgccatcctatggccttcatccagcagctggtggaagtagaagcagacacccacagctaatcactgaactgaactggaatccagttgcagaggaggaggagtgatgagcaaaggggtcaagaccaggcttgtgaaacccacagaaacaggggacctgaacaagggggagttctgggtcgccatactgatagctgggaaaccagcatgggactgatccagaccccatgaatgtgggtgtcagggaggagacctcagaaatccatggggcctcctgtcgtagatcagtacttatttatccctagcataggtgtggactttgggaacccattccacatagagggatactccctgagccaagacacatgggggtggggggtgggggaggacctaggtgctattccaaaggatatgacagattcttaagatccccaatggaaggcctcacactccctggggagcagaaaggggatgggataggtagggttttagttgaggtgggtggtaggggaggaggggagggagagggaactggaattgtcatgtaaagcaatcttgtttctaattcaaataaaaatgtactgatgttaaactataggggctaaggtaggagcaaacgcatgagccaggaatctgtcacattagttcaaggtgacatgactggagcattacagtagcagtagaaggagtgggacagggctctggatttactttgaaggtagagctaccaggacttcctgatacctggagagaaaggggagggagtatgccatatgacttacaggttcaggacctcaccaactggaagagctagaatagactgggagaggctatgctttagttctgttggactgctggacagcttataaacaacatgcatttgttcatcatagttgtagaaggtgggaaattcaagatcaaggcaccagcagatttgtcaggggtgggggtaggggcttcttcttcggctggggccatctgctcacactcctctctcacggcataaaagatgagttagtttcaggagttcttgatgaagatgctgatctcatttttgggtcactgcccttgtagtcacctctctaatatggacaccctaggcactaggattttaatgtatgaagctgaggggaatacaaaaacatatggaagattcattgtattatctgtgaagtggtgagataaattctgatgtgatagttatagttatactagtgacataatgctggtgcagtaattcccttctttctattaaactgaattataaaccattaaatgaaaaaatcaatttgtggcctaatccttatagcatgtctatttttcttggatcataatactctccaggattataaaaaaacctttttctcagtactacagccaaagtgtctatgtttccaagaatactacaaaagaagaatatggattgggtcctttttttaaccatgcctgctttgtattcctctcaaggctactacatgtatatcgaggcctctcacatggtggtcggacaaaaagcacacctcttgtcctggccactgagaggtgtccctgggaaacactgcctgacttttttctaccacatgtatggagcaagaactggcctgctgagcgtttttttgaaaatagaagaagagagtaaagagtccctgttgtggagaagacgaggagagcagagcatctcctggctacgggcacgggttgaatacagctgcaggacgcaacaccaggtaagccaggagggatgagagtccaccagggaaacattaactgaagcgcctggggctctcctgcttcttgctacaaaagaaaatactttgtcctttttcagagtcagagataaaggcaggattagttgaagagtaaacataattagtctgttattgattaactctaagaagtgaatggaaaattagacagggagctgaagctttggacattcatgcataaagtgattgttttttacaactcaagagataaaagggttccaatcctgtcttgtcatgttgtgaatgtcaagtacttttcttccaaaaggaagtctcctttcttctaaatatactagtactgcacctattacccacgatccacttgcctgtaagggcttttgttctaagcctccacttaagagtgtgtatagcctatggtaagttttttaagtctttgtatgcattactatattgcattagaagaaactggggtcttaataccaagtccatggtcatctccaacccagacctccaactaatcatgtgctatagaaagcccctgtcctagatgtattcaattattctagttaggtgggcctaagcaactactctaatggagaaagcctaggcttgccttcctatagccacagacttcacacagccaccaaagctaaagttcagggacgacaaccttcagactcccaactgttcttgaattcactctgtgggagtctggcatgagcatgctctccagctttcctctgcaaccttgctcctgggtggaaaacctccttggccaaatttaacctctggctagctgcctggcctaagctcaggttttcctgagaagaggtatccaaaatatggatattcttttttcaccactctacaacacaagatgatttttctaaagatctaaactgaagaaattaccactcaaactatggtgctgataagccacacatgacaggaagaagatgttctactgtctaggaaggatccatcagctaagcatgaataactgtttggagatctattagagaatgtcagattgctctatgaagattttttatgactgttatggaaggtagatgggccagatgaaaacttactaatgtaattgatcatcattcagagatggtggtacaatcttgttaggctcccaggaagtcagaccctttatcaaatggttctcaaggcatggtctatataccagcagcatcaaaaatacctgaaatataagttcatccaaaatgttaattctcaggctccacctcagaatactaaatcagaaactctgaagggctttggagtcctagatatttactttaataagacctccaagtgattctgatgcaagctaaagttagaaaatctccaaacttaaatgaatatgactctttggggatggtattcaaacacacacacacacacacacacacacacacacacacacacacacacacacacacacacacaccctacctccattttgcaatgtagaagataagtctattacctcacatataccaggcaagtttccctccctgagttatactctcaggctagcattgatattattttttaatctcaaatgacactgatacacaaatgctctaaaacttgagttctgggaatcagcacacagggtcttgctttctgggtaggtggtctttgaaattggttttgcttctgttttgagtggtctgcttatataggccagactggtctccaactcaggattctccttccttaaattcccattgctgggattctgggcatgtaccactaaacttgcagtactatttaaatgtagattgacaaagcatcagaggagtcgatttagaatgtttcagttcaaagggtgcagaatagttagattttcagttcacaatctagaaggaagactctaaagtaaactgacccctttggttagtaatgggacaggaaatcaatttcttcctctgcacttaatgctcacttcaggaatcccaaatgactctaggtggtctaggatgcactctactgtctataaaatacagacacattgtacacatggcctggccatctgttacactgtgggtacttacagtgctaagagctctacataagttgttccaattgatcacatagctccattttataggtagagaaaagcaaatggctggtagagaacttacactcagacctacctagtgccaaagtctgtttccataaccacagttctacactgctacctgccctgtagaacttccaaattgtcctcattcctttggggtcacaagcaccaagtggccttggacaaaccttatctgctctgggattgtttctacatattcaaaatgggtaaataattctcatcatactgacaccagcatcaaatggaattatgtgtgtgaaagggttttagaaacttcaatgtaccaaattattaaaacgcatttcactgtttctaaaaactacattttcctcccagacttccctggtctttggttttcatcaccatggcagaactggtagtctcattagctgtatcagacatacagactgagttcttatagtttaatataaaagatctcattttcataaatattaaccacatacatgtaatatatgctaaatttctgcaataaatataacacatgaagttcttaattcctttggagtttatattcttgtaggagcgtaatttacaaaaacactaaactataagctagggactggagagatagcaagattgctcaatggttaagagcacttactctcttccagagaacctgagtttgcttccagcacccatgctgtgtggttcacaacctccaggaactccaattctagcttccatgggcacctatgcacatggcatagacacatacatacatacatacatacatacatacatacatacatacatacacacacataaatgaaaaacttttaaaccataagctaaaaatagataatataatgtcagtaataataagtcaatttgaactcacagaaacagagttgaataaaggataattgaggtgaggaaagtgatagaatgataagttgtaatggaatgattgtaggaggacctttctgtcctgcctgccagctcccaaataaccacacagagacttcttattaattatgaaagcttggctgatagcttaggcttgtttctaactagctctatagcttaaataaacccatttcttttcatctgtgtgcttccccaaggctcatttacctcatctatgtactgttcatgctgcttgttcttcatttggctattgactccaccctttttcccagcattctctgtgcttcaaaaaatcctgtagctattggccattaagctctttattacaccaataacagcaatacattttcacacagtgcacaggaatattctgcaacaaatgataagttgctggtcaaaggctataacgtttgaggtaggcaaaaggaatgaggtttgaaatccaattgcacaacaaggtgaccacagtcaataataatgcattacatatttcaaaatgactaggctactaaattttaaatgtctcattaccagaaaatgatgaaccatgaataatctgcctgatttaatctttgtgtattattaatgtatattcacatatcatgttgaaccttataaatatatggaagtatggtttgcccattaaaaagaatattaattggagagagagaagaggaaatgaagatgattaggtgataaagccaaaggaatactgggttaattttgcaaaacttcacaggacatggtcaatattttgaaattattccaaaagcagtaagaatccagaagatggttttaaagaaatgatctgattttaaacagtagctccagcaactactgggaaagcacagcataacgaggactggatatttgggtcctacagtattagccctggcaagaagttggccaggaagcatcagtaaagagagaagcctacagagtcttgctagtatttccttctaagatgcagtcaaggctggttttgaatttataatccttctttcttagcctcccaaatgctgtgattatggacatgaaccactacacccacctccacttttgttgttttagagctgccttgcttggtaactttgacctggttttctttttctggatcttcaagacagggtttctctgtgcagccctggctgtcctggaactttctctgaccaggctggccttgaactcatagttctgactgcctctacctccctagtgctggggctaaaggtgtgcaccacaacacccagcttttggcctggttttctagaccaaaagatatacctatcagttccatttattgagtatttaggtccaaacaacttaagaaaattatcttctaatggcctagtagtcattttacatttatgcatatataatgtatatacataattttattcacctgttgggtattgaacaacttctcaaaacagccaaggcttcagagcttgtgaaagttagaccagtttagatataccaacttcatttaaagttctgcatagagttttatatggtgcttgcttttaattacagctgttaccaaaaccccaactgtataatgatattatcaaaaggaatatagtataggcacatctaatgttgaatctttgaatgattttcaactagtagttcccacagtattgccaaatgttgactatttctgtctgtggtgataccttgtttatactctaacaaataaagcttgtctgaagattagagggcagagctagccactagtgaaccatagaggtctgggtgttgtacagacagacaggaagtgagatggctgggtggaaacagaaatatagtcaggagacaggatctcagtctcttttcaatctgaggatttcatagaggtaagagctctggtgcctggctgctttgcttctttgatctttcagctttcaccccctaatgtctgaccctgggtttttattattaaggcctattagaacttacgctacatttgtctgaaatttcaagctatcctacagcacccttgggaatatacttggctatctcagcctacaatttgggaatcaataggaaacctaatttagtcctatatttattataggtgttctataaataaatattcgtttattagttgctacaagatagtgttggttaggcttaaagcccaaggataagcaaaaataatcttgtaaatgaaggaaagaagagttgctaccacatatctaaaattataacaggaaagtcacggggctataacatggttgttacttaagtattaaggaaattcacaaaaggtttataaagtccatagtttggcaaatcacatattatttagaatgtcattcagtcagaatttgtctattatagtaatttgaatcccaaaaccagatgttgttactgttgagaaaaccaaagtgtttattaattgcattcatatattctcctatgcagagcattagaacatcttaccccccttttcttaccacttatttggattcttgtttagggttgtatatgctaaagaaatagaatcctagatggatggacaggcagatggacagatggatcgaagagaagagaaggatttattatactaattggttaagaatttccataatgtgtcatctattgagtattgcgtgctgtgtgcgctcaaagatgatccgtagtccataaggctaagatgtctttattcagataaacaccagcccaaacacaagccagagtggccgctagcgtggccagaaagaagggctttccacgtgtgctcggtcccttaagaggtcatctttgacctcccctgaccacgccctcatgggcgtggccaggcacacctgtaggggctgctaggaggcggggctacagtgtctccctacagtcatctgcaatttgggaaccaggaaaggtatagcacagcttagtctttatctgagaacatgggaaacaatggtctaaccttcacaagacctgaagccttgcctgatataagtctttgaatccagcattcagatgcccagcaccagaagataggtgccccgttccaaaagagagagaactctctcttcctctgcttcccacactgaataaagcccacacactctaacttgggccactgctacaaagaccaatcttttccagaaagtgttcctccacacacatgctcagaaataatgccttacaaccaccttgatgccccttagcccagaaaaattcatgtttaaaattaaccattacatgttatgtccttagaaagttttttgactttattttgttatgtgtttgccattaaagtttccttgaatcattaaattcaaaataatgacatgaacttattcattatcctatttattatttttaagtttatttttatttaatgtgcattggtgttttgcctgcatttaagtctgtgtaagggtgttcgattctggagttacagacagttgtaagctgccatgtggatgctggaattgaacccaggtcctctgaaagagcagtcactgctcataactgctgagccatttctccagtattctatttatattcttaatttggggtggctttaataagatttaataagattagctcagggaacttacacggaaacaagtgactgtcgcggtgctcctgctccaaggatgcagaccttgccaccagcatgctctccataacccgaaggggtcttccaactccaatccttttccttttaaccagtcatgtccgcacctgtgaccactcccaaaaggcgtggtcagtgattacaggtgcggaagcgaatatatcactacactgtgaaatatttcaactccaaataatataatttgaatttgtaattttattttagttttgtttggttattttattttgagactgggtcttatgttttcctggctggcctccagcttgcaatgtagaccaggctgtcctagaactcactatgtagtctagtctggcttgaatttgcaaccatccttccactttagcttcttgattgatgggattataaggccaggcttgaatttgtaattttgtgtccttttccttacagtcatccccaccagttatcaaagtttttagaaccacaaaggctagctcttccctgaccaacacagttttatcagcttgactctatttctaaataaaaatatcattctttttcagataatttttgaagccattcgaggagggtcaataagaagtgatattgccattgatgatgttaaatttcaggcaggaccatgtacaggtaatattttccccaattacataaactagattggaaaatggatttttataatatagtctcaaattttaagaattcaaaattaccttttctatagagagaataaatattgtctgtctttcctgacagaaatggaagagacaactcaacaatcatcaggatattctgaagacttaaatgaaattgagtattaagaaattatatacattggattaagtagacaaaatttgtacctctcttcaatcaaagtgaaaacagaagaaatggatactggatgttcttaactattgaataagttgaaatgactttggaacacccccttttgttacttttgaaaatatatatgtatattgactcagggcttaccttttttattccccagcacatttgacaactgttactagaagtacaggctactggttttacatagaccatttcatcttaattttggtgccagttaaaaatgcaaccgtgctatgttaaagtcatttcaaagtgcacatataaagggcataatcaagatgaatgtgcttatttaagtctgcattcagtgaatgtattggaagactaggtattgatggttttccttttgagtttcaagtacaaaaatttttcttaaataatgcaaggtgtcggtaatatctgcaaaatgaatgcagtttttttatggtgacacattactctggaaataaagcctcatttgtgtattttattcatagaaaaaagctataaatctttagtatttcaccataggtataggaaaggagctttcatggagccccaaggtaagtccatactaattaacgctgtagtacaaggcgagctacctttattgctctccctttgaactaccttggacagtcactatgagcacatggacagaaatgtaccttttcaataagacaagcttgaatttttcatgtatacataaccaacaatttttataaacttgtttaacaatttgactgatttttataataaatgttttggtgaagttttgagtaatatgagttcaactatatttactaaactattgttttctatttactaagagaattgtatatatgtgtgcagtttagtggccaagtagctgttgtgaaacttcaaaattacctaataaaagataatttgaaactcctttcattaacaattaactcgtttctacattatttgtctttaccagaacatattcatcatataattgcaaattctaaatggaatctctattctgccataattaaatgtcttaagtcaccttattagtgatatcaacactgcatatgttcacatagtgattaatatttaaagagtattttatttcccataggcaatctcagttttccctaaattttatcaatagaattaaactataatgacacaaattcttttcttttatctttaaaatttaaatttacttattggggaggggcacatgaatgccatagtgcacgtggtaagattctgaccttcacttgagagattcacttctcttcttttatcacatatgtcctggggactgaactcaagctgtcaggtttatcagcaagtacttctacacactgagccatataaccaacccaggacacagaatctattgtttacttttatgttcttggtgcccagaaacaaaattgaatgagcaaatgggtttattctgtccctcatcccctgaaatggaaataaaattagcattttcaccaatacgaaagcagagtatcagtactggggacatagctcaatgatgcagcacttgctaaacataagcaatgcctggtttgatcccaagtaccacaaagataaaacaaaatgaaatgactgagtttcagaaggtggaaagcattaaagtggtggcgtgcaatagttgacttcctagctttgcatgactataaatccaatggcctcatctgtgaagaataacacgcctctctgcatgccacattacttagaaaataaaaatacccatctgcacaaaatcaacatcctaacgtttatagggaaaactaaatttattttgtaataaaacaattttattagtgaaatttgtcctattatgattttttttttttttggttttttgagacagggtttctctgtggctttggaggctgtcctggactagctcttgtagaccaggctggtctcaaactcacagagatctgcctgcctctgcctcccaagtgctgggattaaaggcatgcaccaccaacgccccagaggtacaatttgagtttgacatatattagacagcataaatccttcacagcattattcccacctataattattgtcacatttgctgaataaggttcactggcatcctcaatggtgacataaactctcacgtaatcaatcattccatctaacatttattgaatacctactattttcagagacagggcaaatatgtttttacacacatttacttactgaatcctaacaacccatgaagtagatccaaacagaagttccattttataaataagaaagctaaatctgttcaagatcagtagttagtgcaagacctagctttgaaaccacgcctgttacaatggcctcttaaacctgccagaactcccctaaactccaacagcaataaagattacagactatccaaaggttcctagtttcccttttctagggtttattagctatacaaataactccaatatggaacttaggggatagctcagtcagtaaaatgcctgccatgccaccataaggacctcagttaagatccccaggcacccttgccagaagcttgacatggtgccaactagatgagctccaggttcagtgagggaacctgtctgggaaaaacatgagcttagcaggttggagagatgcctcagcggcttagaaaattatttgtgggcagcaaagaaagaagtaattactaacggcagttgctaaggaacaacctgccgtttttagaggcaaggaggtggagagctgagtgactcaccttccctcacgtatactcctttcaaggatcccactgtttcatgcctcagttctctttccaaatggctctcagcattccttttgactatatttcacatggatgaagatataggcagatagtaagcacaacatagttttcccaggttcaaaaatgcccaagaggaagcacactagttactaagtgctacttaacaatttaaccctagtctttgcatttttccaactctcagcagcacctaaacacccgagctctttaaatagaaacagctttctatgcagattgccttcactcttacaattcaccatctgcagtggaggttatttatgtatagaaaggaggaatagtgtagaaagcaaggaaagagtacctctcgtgcagggtctagcttaatatggaagaacagtgttcagagatgatttcttaagttatctgtgttctgggcatcttaccaagcatggaggtttacaaagatgctcacagattagtggagaaggtgagatacaagacattcagcaagcacaattttaagaaacacaatgtgatcatatgctcagagtttatgggaaagcctaggaggggcatctgacagcagagattcataatatagcattccataggcctggacgctttcttgtcttactcttgaggggataaaacatgggctccttgacttctcatccctatatttcccccatacaaccaaaggggaaaaaatgagttttcataactagtaagtttcctagtactactaaatttctgatatgtggatcactgtaaagatgtagcataactcagaaattaggtaccctggtcctagattctggctgcctccattcaaatcctggttctaccgcttacaaactataattggcagcaagtcgtttaccctccctctttggttccttttcctactttgcaaaatgaggtaaggcagttactatgaagaaaaactgaaaataataggtggcaggatgtggtagcacatgcctttaatccaagcacttgggggggggtgggctgcaggaaggagaacagggaattccaagtcatggttaattctataaggaattcatggccagcctgggctatataaaacttggtcccaaaacaaagtaaagccaataaaatatccaacaacagccaatataaaactacaagaacgtagacatatttagtttctaacacaaatgtcttcccagttcatatgataaggaattggtgagatttcagataaatctcagttatttttgtgtctctttctgtatagagaaactgtgagcttatagtgccatcttaaggataaagcaaccacataatcttgtcatgctgccatcttcttagcactaggtgcttttctcaagactcactttaagcagcagttaggtaatgtcttccccttgttcccatagcagtcaatgacccagcggtcgctggccatggtttttctgaactgtacatgaatttctcggaaaccatatgctaaattagacttcttgtttataggtccatcttttcaaaaagtgtcacctaacttagctttcatgaggtatttatggattaactaagtgttcaagaaaagcacttggtttcccactaacatgcacatgggttcctaataccagaaggggtataaaaggtcctcttggggtctataataatttcactggtctttttttatgtatttatctggatatttctgtccaaatttagccatcttctaacacttcataagttagtgaatggttgcatattgtaaaatatgcaatagattcaaacccaaccacacgtctcctaaaaccagcttttaaataaggtaaaagaggcagttagatgtctcatcagataaaggtgctcgccattaagcctgatagacctagctggattcccacccccatagggtgaaggagagaacaactcctgtaagttgtcatctgagctccacatgtgtgcaaccatgtgtgcatgcacaaaagcacctacacactagacagatggatagagggatgggggatagatggatagatgaataggcaggcagacagagagttaaaacatttttaggaaaacatatcgagaaatgaaggcagaaatgaggtagaatggaaaagaatatcaaaacatattttacaatgtatatctattgacatatacatgtgttactgtttaaatattaaattacaaatatggtaagaaataaatgctgggggaatgctgacatggcccagtagttaagaccatagagaaactcacacatccttgctgattgttgcactcttcacaagagccaagataagggatcaacatttattgtcatttatttacttcaggagagtcattatgactacaatgagatataatctccaggcagttttaatttgcatttccctagtggcaaaaggtgttgaatgctttcttaaaatatgtattgaccatttacattgttttagagatcactttctgagaattatttgctcaatctacatccagtgtttttgttcagatgatttgggggtttagtttgaagtgttcctagccatcggtatagttgggaaagcttccctcccattccacagatgatctctcgactctgctgattgtttcttttgctgtgcagaaacttcttaacctatttgcaattccatttatcaattcttggaattatttccttagctaatagagtccttttcaaagccccttgatgatgcctgcatcttaaagcactttccttagcagttttagggtttcaggtgttaactaaagtttttggtgcattttgaattgatctttgcacgtagtaagaggtagatagagtttattcttggactggtggatagctagtttacgttgcaccatttgttgacaaagcaatcttttctccaacattatgttttttttatatatctttgtcagaaattggctggctgtagctgagtagatttctttgagtcttctactttattccattgattgtgtctgttttagggtcagtgctgtgctgcttgctatttttggctctgtaggacaatttgaaatcaggtttattccacctccagaactgccttttggcttagcgttgctttgactattttggtcttctgtgtttccacgtgaaatttagtgatggttttgattttgttgttgttaatgtttcctagttttgtgaaagatgtcattagaattttgatggggattgcatgtaatctatagttcatttttggtaataaataattccataatattctgttaatatttgattttggagacctttccatcttttagcatcctcttcagatttttttcttcagtgtcttcaagttttgtttcctggatattttatcattttgaatgggttccccacccctcaatttctttctaatgtatgtgcttttctaaagcatcacttaagtggtttttatatcctgctacattgttaaaagtgtttagcagtcctaaaggctttccaaataattctttctgggtaagtgaacatcacttacataaatacagattatttgaattcgttctttcctggttataactcctttatttctttctctcttcttattgctctagttaagacttgcagtaaatgagagtggaacaagtggaaattctgtctcattacagcagaaatgcccttaggtcttcccatttagtggatataggattgtcacgtatgatcttttcttctttttttttttttttttctagacaggggttctctgtgaagccttagctgacctgaaactcactctgtagaccaggcatcgaactcacagagatctacctacctctgcctccctagtgctgggattaaaggtgtgtgtcaccatgcctggctcagatatgtttcttatattcctggtttcttcaggacttttatcataaggatatgttgaactttgtcaaaataattttgtatccatttacgtaattgggcgttttctgtccttaagtttatttatgtggtagaataatttacatttagttatttgcatattttgaacaaatcttgcatccctgaaattaaatcaatttggtcatggtgtaagactgattactttgttccagaatttagtaaatcttttgatttttgtagtgttttttttccttcttcctctcttgtttactgttattctaatgtggtttattctttcctgtgacctgcctcatgggtatatttgtttgtctcatcattctgaaagattccttcaattatcttctatagagcaagcttagtgttcacagattccaaattttttccccaatgggaaggaagttttattgggggaagagaatggagtgtgggaaggaagagaggagagagaagagtgaaagagggagagagagacagagagagaaagaagagagacagactgagatctgtctgccctctcagagaaatggctcctttattatttctttaaactatggccactttttatttttccttcaattataataaacagctttgctggtctccaatagcatatatcttccagatcttaaaccacatctgtccaggctcttctgtcttttacagttgcagttaaataatctgcttgtctttaattgtgacttcatgtttctctcttgccactttcaatatatttcctttgttctacatattttgtgtttaattataacataatgaaaggaggttcttttctagtcttggcatcctaaattcctcttgtatttttattatcaacttcccccataaatcttagaaactggttgctatgattcttttttaaatgctttattttatttgtatgtcctatatgtatgtccattcaccaagtggaattcatgccctcagaagccagaggaggtcattggctcctttatatcatgctgggaattgaacctggtcctctggaagagccatgagtagttttaatcactgagccatctctccagtccctctttttttttttttttttttacattttttatgcttttagaaggaaattcttctcttccttctatatacctatgacttagtctttacagtgtcacatgtatcttgaaattccaagtattagtttatatgtgttcttctttgattgttcaagttactccaccttgtcttcaagctcaggtattttgtcccttctttgtccattttagtgctgagattttccaccaagctttttacttgacttaatgtgtttttcaactccagcatttgagtgtagggagccgttcctgcattctccattacaatgatggtgcctgcaggcaccaaatgtaaattatttcacaggcgctgggtaatttccattcctttgatctctgcctatcccgtggctcatttggcctgaggagctgaagccattcatagggtaacacgtcccaggcgactgctgccagcctttattaaggaacgggattcttgggccggggtctccgctctggtaagtttatgctctcccactctcaagatgcattaaagctttcctgcagaaggatccgagtgtcctgcgtgtttcttgccggcgagaacatatagcgcgcgcgggacatttgagattggtttttcttcagtgtttctatctctttgtagaatttgtctttctatcttgcattactttccttatttcattcagttgtttgtatcttgaacatatttacattcttttcagttttctgtctgagatttcatctatgtagttcaaaataaataatctctcatgctagaagttcaaatgccaagtataagtgctatattactctaagtaggttattaatgagagagcaaccacaagtgtttggttttatcattatgcaattgccatagtagacaactaagagtggccctgggagatgaagagatggctcagcagttaagagactactgctcttccagaggaccagagttagcttcctaccacccacatcagacactaaggatacattttcaccaaagtcttttcctggcctttcacagagccaagcctcagctgctctccatggcccctttatgccttcaaaacttatacacaaggactcttgcatgttacctattttgattgccagcacaagatacagtcttggctcccattccagaacacagcttctgtgtgctgaccctgaagaaacacttccccaaatagttcactcaatgatacttgtctcttcttaatatttattgtggctccaaagaactagcatcaattgtcccaacaaagtggttctggcctcttattaatcacagcagattcttcaaccccagctgactagaaccactgatttttgattgaaaatatcaaatggacttgatcagagtctttaaggaactcaccaacttccctctacacttcacaacacaggcctcccatcagctgcatttctctcaacactcttatcttccaaactcccacagaacaacccactgagctctgagcacttaatggctttcctggcccaaagtccaaatgctaccacaatcctccctgaaacacaaagccaggtctgtcacagcagcacaccatataatctaataccaatttctgtcttagtttgggtttccattgctgtgataaagcaccataaccaaaagcaacttgaggaggaaagggtttatttctacttacacttcacattaacagtcattcaccaaaggaagttagagcagaaactcaagacaggaactttgaggcaggatctgaagtaggggccgtggaggaatgctactactggctttctcagcccactttttttttttaatcactcaggaccacctacccacgggtggaatcacatcccatgagatcagcctacctacatcagtctttaatcaagagaatgcacaacagacttgtctactggccaatcttatgaaggcattttctcaattacgattccctcttccaagacatgtctaagtttgtgtcaagttgacaaaaaacccaaccagtccagtcatagaaatcagactctctggagacacagcagagtgaagagggacaatgaatgcagagttggaagcagagaaaatccaaaacctttacatgtctcaatgttttgttttgttttgttttttttctcatcttagaacatgagcaatgatcttcaaagtagggattatggaatcttttttgatcgtaatgagaatgaatcagaaacacttccaggtgttttttgttacgataaatctttctgccaaaagccgcctgagccccactgccacgtgtgagctttacgacagctgcctacccgagttaggccaaaatgaatacacagaaacttgtattagttaccttgctgcttggccaatgactaggattctcatctgttagctctgtctcaattatcatacatatatatatattttataagacttatcttatgggacgccttattggcgtccctcctagctggtggatcacatcgtgccactggagcaggagccgagaggaaaagagagcgacacttcctttttcctcttcttaaatatgagtctccttgttatgtcacttcctgtctggaacaccacttctctactacatttcccagaatcctctttgactcctagtccagcctaacctgctgtctcattggccaagcaagtactttatttataaacatacacagaagtatttcccccatcagtttttatacacagcattcctcaaattaagaaacatcagtgtcattcctggtttcttaagagcatattacaaatagacattgaactttactcctttcgtgttgagatgattcctttccctttattagtacatgagccacattgacacattattgatttctttttcctcatttaaagaagccttttatgtaaagcataactgaaaagtacataaacagtaaaggacaagcacaagcaagcaggagacaggtgggaacagaagtatggagtggggtgaataagaatacagtgtgatgacatgtagttattaaaatgctataatgaaactcattattctttgtgctaactttaaggtgcacttaaaaaccaaaaaaaagggaaaaatatgtaaatgttaaggaataataagaagcactcatgtactattgacaatgcaggggaagtaaaacattaccagcagtttggaagaacttatatgtacactctatatgtaaagcattaccagcagtttggaagaactctatatgtacactctatatgtaaaacattaccagcagtttggaagaactctatatgcacactctatatgtaaaacattaccagcagtttggaagaactctatatgtcacaatcccttccctttcacaaagagttaagcatttttccatctcaaaaaacaaacaaccaggccagtgaggtcccatagacacccaaacattacagccattgccattgctgtgagttaacctccatagcctgatggtaagatactgatactgaagacagcacataattgaatcctgggatatgtagaaatcgagtaggtactctcctggaagctttatgcctaactagccagctttcatagtgccaaaaggtgctacaaatgatgcaggaggagaaaagtaatcatcagtcttacacagctgtgaaccctgtatgctacaataacaactggcctagcaagacatgtccactggtgcaatagtggcacaaaatatcataggcgtaaccattttctgattgactttaaagcctgctctaccatatggaatccataccaagcaccattatcagggccacaacctgtggctggatgaacggccttaggggaggatttactactacaaacttctaatgacttactattatactcatagattagtacatctctcaactcccatcaaagaagcttatttcttcagtaggtggcaattcacacagagacccacaattgtctgaggtgcagtaaataggaaactgtggaacatcataactgctccttcccaagagtggggaccatgatccaaattttgtttttataattttgtgtattttaaaggaaacttacaaaaactaaacaagcttcaggccccacagaacctggatccggaagaacagtgacactatagaaaagttagttgtgtaggggggtgtgggggtgtgggggtggggtgggtgtgtaagctggtagcccaaaaaaaaaatccaccttcatttgaatgcttgaaatgggtgttgggaaccaaactctcatcctctgcaatagcagtttatactatactcttgactactgagccacctctccagccctcaaaatagttatcaatgtaattaaagactgatacagcaagacaaaagtatgtactttcatatttgagtgaaaattttaaggcatattaaaaggtatgtgttactaatggtctgccaaagtgtctttggctcatgttaattttcaatcacccagaatccaacaaaagctaaccacgtaaatcagactgccatgaactcctgtctcttcttgccatatattcctctctctgaccagccaaagcattcctgtctctatttccttagtgctgggattaaagatgtgccactccacatgctgggatcacctttgtgtgagctctgtttctcttttagactggatcaatttcgtgtagccaatggtggtcttgaacaaacagagatctgtctgcctctgtctcctgtgtgctgggattaaagatgtgtgtcacctctacctggcctctatggctaattagtgtggctagctttgtactctgatctttaggcaagctttatttgttagattataaactaaatatcaccatagtatatgtattcaatgaaatactaatttcttaaaaccaagttatgaaaactatttaatggcatgaaaagtaatatattaagggggataaatacagtataaataatgcaatgtgtgtattatattattgccttctttgaggaacaaaaggaatacaccacacacatacaaggaaacagacaccaaaacttcactaaaatcttaatgattagttggaataaaggaattaaaagtttttccctttgtaattgtttttctgtgttcttccccaaattcttgggcttattgtttttataattagaggtaaaaccagtgacattttcctttaaaaaaaaactcagcctttaatttttttttttttttttttttttttttttagtgtatgtgtgtggtgttgtgtgagtgaaggaacatatgtaagggtcagaggacaattttcaagagttggttgtctctactatgggatcccaggattgtagcagatgcagttatgtgctaataatcttgttgatccaaccttttcctttttaaaggatggtatctattaggtcccaggcaggcaatatatgtagaaatgaggtcaaatgactatagaaggatttctgacagttagataaaagccagcattcctcgggaacttataaaatggttttctgtccccaaaaggagtcatttcccttgccacaagcagaagggacatatggctccactgacatgcatgtgtggttgcatatcaaagtatccatgctactctaagctcgaggccagcctggtctacagagtaagttccaaggcagccaggccttcacagagaaaacctgtctcaaaacaaaacaaaagcccatgctagcctgcaggctcccttggccccattcagtagtacccattatgcattccaaagcccctacaccaacatcttggtccttcttacctcctacccattctctttaagaccctcaagattcttccccactctctcttctttctgctttcccttacagacaaccttggcagtttggaatgaacgtttcctctttccaccccatggagtggccatttctgtggtttctttactgcatcctcaagtacagtgtcaattatgactagctggttaaaacacatagcgtggctgtatttctgaagtgatctaactttggggatttactctcaactttcaagtttagaaacacaattttaatagcactctaaaagcctaatcctggcatgaaaatggtgaacctggtcccctacccttaatccctacgttgatgcctatattcttatttgtccatagaatagatttcctcataactaattacttcttcagagtttgactctcctcctcttcctcctggatagaatttgtgatcctcctggccaagtacccaaattttgagactgccaacacatgtcatcaagtttggcagcatttaaacttttgaagctacttttcaacaagcatataccagcaatgtgtggaagaacaaactgtaaggtctcctaagcactaggtcttttcatttcttcctgtctattgaatattttacaagttattccttaattagcactaaaataaatagatctagtacccatgagaagtttacatgtttcctacaatgattttattgtctttggttattactgttagtgataagattccacttgtgtaagaggaagaaggagagacctgcagaaggagttttggtctagctgtcaagaaaggactctactgcaatgaatttctaaatggtttccccacttccatatttgacacccttcaaataatttccatacagcaagcagaatgacttaaaaactttaattagatcacagccctctcctacttaaaaccgtgcaatggctccccttgacctgcactccccatttcctatttattctctggtcggttttgcactcactattggttgggtgaatcgcatctgtggggcttggtggcatcatctttgaaagggctattgagcggaatctgagcacagtgagcagagctactcctaaagaaactagcttgttctggttcaaggatttctggaaaacaaggagtttaagcagggattaaggaacctccgcaagaggaggccatccggtggcctgcattgaaaccccctcgcaccaaggaagaagatgcagatgagttcaagaccagcctgaggtgtacagtgagtagtagaccatgcagagatatatatagagtgcgtttcaaaacataaaagggcaaggaagtgtgcgtgggcgggtaaccattgcggtgcattcttcacaattttgagagcgccagagggttgctagcgccatgcttcaaacaaccagcacagagccaatggggaccggtatcttttatgttctttggagtatggaggttgatttgagaccggagaaggaaaccgcaacgtagaacccaaagacaggtgtggccagggagggacagtcgcaaattcgcacgcgacccaagcacgggaagcgccgaggcaggtttcaaaacagtaagtgcaattcacatattgctctaaagttaaaactctctgagaagaaaaccccgaaacgtacggaaagctgtcctccagcctcagcccttccagtcgcaaagccagtcagcaactccgagcctctcggagctgcggcggccgccggggcggggcggggcggggcctcggcttccccaaccaaatctgcgcaggcgccgcgcggtcgcggggcggggtcaggagggggtcagttagcgcgggagtctgggctgcggctcgccgggaacggaagccgctgcggaacgcggaggaagccaggatggcgactccgactggcaaggctgcgaccctgaacccccaggcttccaagagggttctccccagagatgcctcctctgaggtcccgggcaagagaaagaacccgaacccgacgtcgaccctgccgcggccatccgggccattcgtggagggctcaatcgtccgcatcgccatggagaacttcttgtgagtggccgcaggccgcgcctgggcgggagcaagcggcccgcaggccccggggcggtgcgctgtgctcgctgtggggtactcgtacctggcttcccctccctcaggctgcccctacctaggccgtggagactggcggggttggctgtagtagacgtgtggactgagggttttcgtttttgtttttttatccacccgccaatggttttggaaggcgttggatgcagtcagcggatatgcaaaagggccaggtcttctagtatagctgctagtcgtggtctcccgaggacttgtgcaattcacaaaactcaggaggcaacagttagaggcagattttgaaagtgtacaccttttccgagtgggcagatgagatggtaatggttgctgattggaggttagagtgtacaaaaaaattaaatcgtgttcccagattttgtacctccttggagactcttggcccttcagatccccatttcttccctgcacccaccccaactagttaagtagattctaaatgttaccaaaaatatcttagcgtcttattagagtttttcttttggagcattttttttaaatgtagatttgaataagttacagaactctagtagcagtactaccttttttttccccaagcacttacgtaccaggtacacatctgtcgtttacacatcgctgtttcttcctttctttattgattatataaacagaaagatgctgtttttacccggctttatatcgattctaatagctgaatttctgtctgaatagagatgaggaaagggaaacgtattcaattgaggtatctgctgtaacttatccacccagggtttcgggcgaggcataaagtctaaaagggctagtttcatgcacaactgtgagagctttgagaagaatatattaaaatctgaaaagaagggaagatgatgcacaaagaaggaacttcctgaaagccagtttgtaagttaacatgtgtggatagaggtcagaaacccttgtctctggtctgttactatgctgagaaactccagtttcctccttcaggtagtcagcaacctggaggcagtctgcaggatgattttgagaggataccagacagaaagcaagaagacttaaaataagaaagggagagccgggcattggtggcacacgcctttaatcccagcattcgggaagcagaggcaggcagatctctgtgagttcgaggccagcctggtctacagagcgagtgccaggataggctccaaaactacacagagaaaccctgtctcgaaaaaccaaaaaaaagaaaaagaaaggaagaaatagagatggactgtggtggtgcacacctttaatcccagtgcttgggaggcagaggcaggcaggtttcagtgagttcgatgccagcctggtctacaaagtgagttccaggacagccagggctgttacacaaagaaaccctgtctcgaaaaaaaaaaagaaagaaagcaagaaatacagggtgaaactattaccaggtgaaaggaggggtttgacaagatcttcccacagattgtgaggtgtgaggacaaagcgattagtagttcttcccaagcctccatttcagctaactggtcctgtgttacccaggagagagtggagtggagagtaaatgatgaatgcagttgaatgtctgtgtcttgaacttcctaagagaagcaaataaacgttctataggtgtagtttataactgcttgtagctcagaggcaacgtgaaaagtcacagacttgggagtcctcaggtgattgttgatgttgcagaagttgttgaaactaagcaaaaggaagtgtaagttggaagaataaaaagtctgtttattgtaagagtgagaggatgcacttagagatcctgagtctcatgaggactgttgtcagggaaactaagttaaagtactacttcaaaagtacctgcttcattgaattgtattgagaccgaagcccccctacacttagcagttggaaaaatgctgcccctttgataaagctgtacaaaagaaaattttgcagaccaagggagaacaaggaaagaaagtgtcgacaaaaacagcaaagaaaaaagtagttgaaaaatgcagagttgggtatggtttggggagtatattaggatttttttttttttagaagaatggaacttacagaataaatctatatgtgtatatagaaaggccaattattagaatggctaacagtctaacaattgctgtctatcagtggaaagtccaagaatccagtagttgtttagttcatgaggctgaatgtctcagtatgtgccagaatcccaaagatgaaagttctaatgctagtgaaggaatggactccctagtgagagtaaaggcaagcaagcaagcaaagatagcaaactttcttccatgtcctttatagagtctgccagcggaaagtgtggcccaaattaaaggtcgatcttcacacctcaaattatctggattaaaagtgggtcttcacacttcaaataatttaaaaaatccctcaaaagtatacagagctgcttgagttttagtaaattccagatgtagtcaattttactaccaagaatagtcatcacagagagtaagtccaagaagaagtaagtaacaagcaagtagggaggctaggtttagagaactcagatggcctagaaatagtacatgagtttgctatgaatgaactaagttgagtgggcttgagagtaaagggaaagagttctaggcaattgcacaaattagtcaagaaactaagagaaatatataatagaacgtaaaattctgagcagagatagaaaaactgaaactagggtgaagttacaaaagatcactttccccctcttttaaagtaagatgtatgtgtctgtgtgtctttgtattatgtcacaggttcctttggaggccagaagagggcatcttgctccttggaactcaagttacaggtggttgtgagctgtcctatgtaggtgctaggaaccaaacttggggcctctggaagaggatgacctttcatgacagtggaactgtctcttcagaccagccctttagcttttctttctttctttttttaaacaggtgatactaggattcatgtgtatccatgtattttttttttgtcacttatttatttttgctaccacctggctgttttaaaagtgttaagtattaaagttggtgtgtgttatttaattatttatatatttagcatgttagtagcgctctggcaactatcttggggaattacttaggtgtacctgagcctacgcactaaagacctagagagggaatattacttatgaattccaattaaagattttgaaaggcaaggtagtttgcttcatattttgccaaagctatccccaacaaataatgaggattaaacacagataaaaaattaataaaatagatctgaaaaagtatgtaggagaaaatcacttattgaagagctcacagaagcagcagatttagaagcagacatctaaaactataggtactggatataagttaaatccgtttaactcatttaagtatggcgtcagagttactggacagcacagtgtgtatgtgcagacttgatcattatagatctctggtcatgcctccttgccttctctcagagaaataaggactattggagcatagcctgttgtggattcttggaatcttcttgcagcatattaaaggaaatgaagggcctttttaaaattaatgaaatgaaactgttgatttgataacatcattttgtgatttgaataactttgttttaaatattaatatataaatgtaaataaagtatagtaaaagtactaaaatatgtaaaatatagtagctactgataagacattagggaaaaactgtggcttcttgtataaatttgctttaaaattattttacttgtgaggtaagtttgctatagtctcccaaaagaggataaattgtttgaaacttgggtattgtgtttgtttaacaacaggattttactatgtaaccctgactggcctcaaactcagaaatatctgcctgcccctgcctcataaatgctggaattaaagacatgtgccaccatactcagtccctgggttcttattttacctatgcattattattttttccattggtagaaatgtccctttgtaagttgattatttaaaacttagagggctaaggatatagctggatgataaagcatttacgaagcatataaaaggccctggtttgaatccttagtacctcacccctacctctcaaatatatgaatagtattacattcataaggttagctagcttttaaatgaattataaaggggttgtgggcagtgataatgcaaagcaacagaaaatgctcttgcaaagaaaagtgttttctctcagttctgtttaatgattttacctctttacaattcagaacatatgatatctgtgaagtgtctcctgggccccatctgaatatgattattggagctaatggaacagggaagtcaagcatagtgtgtgccatttgccttggactagcaggcaaacctgcgttcatgggacgtgcagataaggtgagttaacatagttaagtttttaagaaaatgcagaaccatctgtttttagaaaacaagtcagtttctacattttggattcttgaaataagctttctttctacctggaacttctagagctacattaatagttaacctctcaggaggttacaattaatactgctctagaagttgtatgtagaacagtatattagacaaagaaagatctttcatcagtttccagataagcctgatgccttaataggaaaacttctcaggattgtcggataccaagttagataaaacttagttgagtttctggacattaacagtgaacaaaaaaaatgcagttaaaaatgttgggttttgtcttttttaagagagagagagagagagattgcatgcatgcatgtctgtgtagggtgaaaagggtgtcttattcccctggagctggagttacaggaagttgtgagtcatacattttgtttgctgggaatcaaactctggccatctgcaatagtactaagtgctcctaactaatgaattctctctccaggcccagatgttgttaataataacaatgcaagtataaattatttaagaataaattaacaaagattatacaaaaaaatataaaattgtattttaaaagaacagtttgtgagcaagttgagatagttgagtgggtaaaagcacttgcttccaaactgacaacctgagttctatccctcccacaggttgggaggagagaactgacacatacatgagacatgtcgtgcactctccctgcaaataaatatagtacaaaacaacaaaaacacagtattttgttaaagcttaaaatgtagtactgaaaaaactgctgcattagtcaagtgatactatcagatgtttagctgtacttaaaatgtagtgctacaaaattgaaccaaatactccctagttgtagataagcctattcaaatgttaataaattagcctgatgaccttggccagtggtctgaacatcaaacgttcatttcaaagataaggggattaaagtagttaatttgcaaggaccagctcatatttttgtgaatatttatatgtactttgttaagtcatgaattcattcctgctgcacttggttatattctcagtctgtacaggttgtgctatagcagtttttactagccttgctggttttattttaaagaaaccacatctcctcttggagtggtagggttttttaagggaggtcctggagtgcagtggttcctaaatacagactgttggccttctgtgtctacatatttaatatttaattgagatctaagttctcagcaagaataatatatttctgtttaaatgttagtatacaattttactacaagcacgaactaaatcatctgtatgaatactttataataaataaaaactgctttctatttttatccttcattagtaccagatattttaattgttgcaagccagtgcacaattagctccttgagagaggtccttgttttctatgagtaaacaatgttaagtcacctctccagccaaggccaggtaacttacttgtacatgacaacgttctgatttgaatgcccccctccatctttctgatccttaattccttaatttcatcatctataaagtggttatagtatatgcttcagggttggtatactgccaattgaattttccagttggtcttaacagcatataataaatggtagtttatttacagtcattatcacaaatcattagcattattaaaataattattgcaaggccttatttcttttttgttttgtgttttttaaagagttatatgtggctgggtagtggtggcgcatgcctttaatcccagcattaatcccagcactcgggaggaagaggtaggcagatctcagtgagttcgaggccagcctggtctacaaagtgagttccagaacaggctccaaagctacacagagaaaccctgtcttataaaacaaaacaaaagttgtgtgcagggtgtgtgtgtgtgtgtgtgtgtttgtttgtatgtgtttgtgcacttatggaggccacaggagggtatcagatttacagatagttgtgaactacccagcataggtaatggaaacagatctcaggtcctctgggaaagcaccaagtgctgttgactctctagcccttgttctttatatattttgtaatgttttgctggtcactatattctgattaaatttttttctgttgttggtgattttcttaaatttacctttcagtatattttatagtactttaaaatataaattttataatgctgtatccacgttagtttgtattggtactacttttccttgtttttttttaatgtattctttaataataacatacaatatattttcatcatattcatacacacacacgcgcacacttacttgttttgtagttttgagacaggttcttgtgtagcaatggcaggctagtactggtatgtagttgagggtaaccttgaattttcctttctaccaaatactaaggggtgaagccatgacatttctatcattttagtatttatttcttatggagctcaaacttaagatctggtttgatgttttagtccttcagtctctgttgtatttaagctcatagtcattagaactagttcagatgtctattttactatgtaaattataattttattaatcatatttaaaaggtacttacttggtggcaggtctatctttaaaacaggatgggcactattagagtggtgttaatgtttatctgtacacctttatgggtgtctgccactggagtagatttgatgtagtgctctgtggttgtagtatagaacttgttctgtctgaagtttaaactcttctgagagtacatagtactctgaagcctgattgcccagatttgtatcacttccacttagcaccctgaaaccagctttgtaagtcttaactgcctggcacaaaagtgatctgtaatttaactattgtgatttctgtagtatgagaagagtacagggacctagcctttctgaaaagtggtcaggatggacattcatgtagttacggaaaaaaaatcttgatttgaagaacagcaatgacttttctagatctctgattgttatcctgggaatactgttgctgcagctcttattctttttacgctgtaggttgggtttttcgtgaagagaggatgttccaagggtttggttgaaattgaactgtaagtgtgaaatcttctaaaacatcccttttctgtattatttttcaacttgtatttatactttcttgataacgttgggaaagaatataaatgtaatattgtggcaaatatagacaatgctttttaaaggatatataaatcaagtaaatatttttactgtgtcttttaaaaaaaatttttaaaacatttttgaaaagttctttaaattttatagtttagtgggaataatggaacaaaagtatatggctgaaaatatatgctaagaagttatagtcaggtctgattatatacttcataattttagcacttaggaaatagaggcaggagagtaaggagttgcatgctattcaggagaattaggagtttaaggtcatcctcaagtagataacaagttcaagtccagcctagactacttgtgaccttgtctcagacaaatactcacaccagagagggggaaagaaaaactgtggtttttcacaaatttaagactttttgccagttttgaaatatttgggctagagtgtagcgtagtggtggagagcttacctgatatgcttaaagtcttggctttgatccccttatgaagaagatgggtgaacagatgggcagttgaagcaagtacttctgaaagcaagacatgagtaaatattcttctttcagattctgttttacttaatggttctttataggcatatactatagttctctctggattcagaatggagaacatgatgagtaacccatgatttcaccattttgggcagagggttttgattagagaaatttctacgtggaagtcagttttcattcatacattttccaagtagagaaagtttcctctgactgttatgttatattagcttttaatgtactaatcacttttgaattgcagtcagtgtatgtgactgaatagtgtaatgcttaaaggataaataaacttggtgtgtttggggattagtattggcacttgttttaatttcaacaatataggtagttttgaacgttaactaaatagtaactgatatggccaattgtggaataattacaaacaaaaagccatgctttctaacttggaagggttctaaaaataccagaaagaataaaaattatagtaatatttcttagaccttgggtataagaaaagtaatagaaatgttattcttaatcaatgtgtgttttgaatataaaagctcttcaattctttaattaggttcaggacttcgggaaatcttgtaatcacccgtgagattgatgtgataaaaaatcagtccttttggttcatcaacaaaaaacctgtaacccagaaaatagtggaagaacaagttgcagccttaaacatccaagtgggaaacctatgccagttcctgcctcaggtctgagaaaatacatgagaacatgggaaaatttggggtgaatgttttggctttatgccacagaaaacataaataccattcaagaaataatgcagtggtatttgtatcaaatgcagcactcttaacatttgtaattctttctaaaaggaagcatcccgttaatgttataaaaatattactctttacattgagcacagcacgcagaacttactgtttttatgggcatggtgacacatatctgtaattgtagtactccaggctaagtgaacctcagtcgtccatatattgtgttaataattttaagttccaaaatgtttttaaaactatgtatttttttcatgtgtatatatgtgttgtgcattggtatttgagtacacatgtgtgcacatatttttagaggcagaggttgatgtatgttttcctcactctccgcttcatttaataggatgcggtcggcaccaagatcttttcagtttgactagaagattccatgtctctgtcataatagtgggattacaggcaggttgccatgctggatactagagatccaaactcctgtctgtcctcacacttgaaagcactttctccactgagctatctccccagcccgtaagaaaggtactttaagtacagagtagatgcagtaattcatttgcaaactttgacatttttcaaggaacaacttctttaaaatatttttattaatcctttgaagcttcatatagtgtgttttgatcataactactccctatttcttccccttaactccttcaagatcactccaactccacctccccatctactcctagttttgggtcatttttaatttttttgtaataccccatggactccattttgtactgtccagatactctgtgatttgggccatgcgctggttaatgtaccaggagccacaccaataacgaaagttgattctccctctcccagaagccagcagcttaactattcttgctcttcaactagggtatgggatttataaacctcagtcatccttatattgtgctaataattttaagttccaaaatgaaccacttctagaatgttaactgactcagaggttaagagcactgactgcttttccagaagacctgggttcagttcccagcacccacttgacaacttaacaactgtctgtaactctaagatctgacatcctcacatagacatacatgcaggcaaaacactgatacacataaaataaaaatatataaataatttaagtaatatatattaattggcttgttctggcagccataattgccgtgcattaagtgtggtgatcctgagaagccacagttaatgaacaactttttgttgttgttctgttttgttttgcctttgaagacaggattttcctgtagccctgcttgtcctggaatttgctctagctggccttgaattcagagatctatttgtctctgccttctaagtcctgggtttaaaggcatgaaccatcatgcctagcttaatgaacaacttttaatacatttgcatgaaatatttggctaagatgaaattcttttatatgtaagtgtactttctaaagtctagtattatttttttaaatattaatatttatcaataataaaatatcctggtctgaagagatggctcagttgttaagtgcatatactagtctttcaaaagacccaaatttggttcccagcacccacatatggcagtttacaactgcctgtaactgcagctctagtggatctgatgctgccaccttgattccctggacattgtactcacaagcacaaatccacacatagatacgcacatataaaagaaaaatttttaaagaatttttttaagtcctgataatctacatttaaaattatagtcacatatcttgttttaatgttgctttgtgactattttcttcacaaacataatgatttgatttaataagtccaaattaaatgccgatttaaaatttgaaagttatatttatcaaactacctccagaaagaagtatttttactgttcctcgttactgtaggtattaatgatcatttcagtctggaagactgtttccttttatttccaacttgcttgtttgtataaacatttctacctaggaatagtgacatgttcttttaacattataaaaaaacatgccgtcattttcgaaacacagtatatagtaaagattttaagaagattcatatctcaggaatttttttaaatgagacccgttttgttaaacttaatatattttaaaggtatttatggatgatagttgctaatacttaattttggtgctgtaggacaaagtcggggaatttgctaaactcagcaaaattgaactacttgaagccactgagaagtcaattggtcctcccgagatgcacagataccactgtgaacttaaaaacttcagagagaaggagaaacagctagaggtatttaaaatagacaactgatttctgttgtcttttactgattctgcttcgaaatatttagagaatgggtaatatttctgtatatggagtaaattcataattgttgattttttttcacccaagcttatatttctaacatcaattgatggcagaaagtgagaatgattttgattttatgaaatttgaaatatttgattgtttcagtaaatacatgtcaccagttgagtttttaaggaactttttcataggaaagtacatttttctttcatttggtacccatgaaatagctgtcatgtgctaggcactgtgtaaggttttgagtattacagaagataaggatgtggtgttgatgtcacttggggtattattttcttaagtcaaaagaaggtagactgtataagctaaattatagaattatctgttatgtagaattagctgaagagttcatttttaatttttacctttgataaattgatacatagaaatgttgtattacctatcatttttaaagatggtttagttaatggttctagttctagatccttagatcttaagacagtatgtttttagaattaaaaatcaagatatgtcttctctttaagtataactatctatggcaagtattttattagtaaagcattagttttgttggctttattcaaaaggaattggtccaagatttttgtgattacttagttctgtgtctggtactcctttaattcttttgtcttattttgcactagtctaatatttccatctgaaatagatttctaagttacctcccatccactgaaggtgacaagtatgtattcccccccccaaggctcttcagtgcatctttgtatttgttaatatgcaatagaaagatttaattttagctttttgtcgtctcaaagtccttaagtcctaagcattcatgaatgctaatcctgatactactttgcatttatatgccatttttacagcctttattaagctttcatctgggcagataggactaaaatctaaactgtttcatattccaatcatgggtgtctacagagcttcactttacgagtattttggagcttcagattgcagatgcttaactggtagttacatccatgcacatactccacaatctgatacatttcaaaagtagaagcacttttagcattatgcattttgaatagaggatacttaacctgtattaagtgaattgcttcttttatctttagacaaagccatgggcttagaggtgttgacaaggcttcctcacagttcctcaaccagaacctttctgcatgagtgttactttcacttgaggttatttttacccccttgcttttagataggtcttctgtagcctagactggcctttaactctgtgtagctgacaatggcatttaacatgtgatgttcttgcctcttcctcctcagcactaaggttacaggtgtgtatcactaggctagttttaagcagtgctgtggatcagatccagaaccacatgccttccaggccagtattcttcctagcctcacttattttaattcctacaggattctttttgtgaagttttgattatattgtgtttcattgttaaaaaatttgacttcccatgtttttttttttttaatttaaactaattgttaacaaatgcttattttagacctcctgcaaagagaaaactgaatatctagagaaaatggttcagagaaatgaaagatacaaacaagatgtggaaagattctatgaacgaaagcgacatttagatttaattgagatgcttgaggcaaagagaccatgggtggtaagtgttaattatctgaggtaaaaataggtgactcttcaatgtcttaggttgttgctttctattgctgtggtaaacactgtgaccaaaaggaatgtggagaagggtttatttcagcttataaccatgctctattctgaaggggtatcagggcaagaactctaagcaggaaccagaagacagaaactcaatcagaagccatggaggactgctgcttcctggcttgtttcccatgtctttcttagctgctttcttatatcccccagagctacctgccccagggatggcaccacccacagttggctagaccctccacagcaatcataatttaaaaaactgtaggtcagtctgatggaggcagtttttcaattgaggttccttctcaggtgacactaggttgtgtgaagttgacaaaaaccaaactaaacaaaacaaaatcaatgaatgcagtgactgagcacttataaagcccatctttataagtaggcactcactttgtattcaggttaactactgcttttaaagttacattacatgtcatacataagtatttttctaattctttgatacatgctaattaccacatagcaaatagttgattgagtcgctgttgttaattcttcagtttttagtccttagcaggtctttgcttttttccttaatgttaatgagctaaagtgtttatttattcatattaaaaataaagttgcaggggagggggcattgctcattgccagagtgcttatctagcatgcttgatgtcctgggatcagtcctcagtgccactgaaaatatttgtgtgtgtgtccccagtaaggtcattaagaattcagttgaggtatgccacatgtaactaaagtatcttaactgtcttctcatacttcatgattttcctaaaactctgttatacttctgttacaatatgacacaaatttattgcctatggctagttggaatgaatagtgcatttcgttgataacattacttaatgggtagaaaaattaattttcctagtgtttgttccatgttttcagtggaaacagttattagaatgaaagtaatgtctgaccatatgtatataccaatgtatacatatattgttttgttttggtttcttttgggggagatggtttttagaggcagggtatctctgtttaacaaccctggctgttctggaactcactctgtagaccaggctgacctcgaactcacagagatttgcctgtctctgcctcctgagttctgggattaaaggcaagggctaccacttcatagcatgaccatatatttatggcacttttacttccttcaaccacgttttacagttttgttattctttttttttttttttttaagatttatttattatgtataaaattctgcctgcatgtatgcatacacaccagaagagggcaccagatctcattatagatggctgtgagccaccatgtggttgctgggaattgaactcaggacctctgatccatctctccagctcccagtttcattattcttaaactttttccattctgtaccttcttactgcatttttcctacttactatttttcactctgtcatttaaagtgttttaatttcttctcttgtttttaagatttatttatttttgtgtgcattggtgttttaccagcatgtatgtctggggggggggtcagatcccctggaactggagttacagacagttgtgagctgccatatgtttgctgggaattgaacacaggtcatctagaagagcggcgagttaaatcctgagctctctatccagcccccaattccttcttttttaggagattgattttaatctttttaatttaaaatctgtagagctttttttctcctttgctttatttcattcacttttgcaaaagttttgttacttttaattgaggttaggctgtgtacataagtaccttaggatgtcagaagacatatgatcatttagaactgtagtggtgggtttgaactgtcccttgtgtatactgggtcttctgagcaggaagcactcaactgctgagccatctctccagccttcccaagccctattcacttgtattataatatctactttagcattctcttttcttgttactcagcaaatatttagctaatacctctggagtgacatctctttttgtgagaggttattctcgatttcactcatttgggtcccaggaatttaactcatgtcaacaggcctgatagcggtgcctttacctgctaagcatgtctctggcccagacattgtttttgttaagctagtatctacatatttctttttggttgtttgttttgtttttttctgagctattttttacctttgaaaattgatagttttgtttgtttacctattctttaatcttgcctttattagtaaattaaaagaaaatcgctgcttacactttggctttagtaggtgttaatttaaattacttaatgtattaatttctgttccttgaattatttgtaaggagtatgagaatgtacggcaggaatatgaaggtgtaaagctagttcgtgaccgagtgaaagaagaggtcagaaagcttaaagaagggcaaatccctatgactcgccgaattgaggagattgaaaggcagcgtcgtactctggaaactcgaatcaaagaaaaggtactttgttgttcatctttgggttgtctgaattttatttaacttagacaaaataaatgcttttcatgtctttgaaagtattttctaaggttcactttcagcttttattcctcaggttctttaggaattaatttacgattttttagagcgtgttatgattagggagaatttctaccttaaagaaacttcaagatgattgttgctgggtagattggctcaggttagcacttaggacactgagccattgaagctagcatgggctacagaatgagaactagcttcaagagaaaaagtgtttgttttcattaaaaactgaacatttttcttagaaacactgagctccttttctgagagtattgtatgtcttttataactttaaatgtttatgttagtgaattctagcttcccagagatacctaggggtcaaaggtgtcttagcgtttctattgtggtaaaacaccatgaccaaaagcaatttggggcagagacggtttatttcatatgactgacagattacatccatcactgagggaagtcggcaggaccttggttagagaaactgaagcagaaaccgtggaggggtgcgcttactggcttacctgaatgctttctcacacaactcaggtccacttgcccagaggtcacacagcgcatgacccctgtgggctgagcttgcccacctcagctattaatcaagaaaatgcccgatagttgtatccacaggcaatatgaatagaagcatttttctcaatttaggttcctcttcccaggtaactcttgcttgtgtcaagttgaccaaaaaaagtagccagcacaagaggctattttgaaaatggttaaatgtctgcttgtagaatatggtaattttctcctctgtgggcactatatttcagtggatacctaaaactgaagataacaccaagccctatgtagtttgaatatccttgtgcaaaatgcttaccacaaaattattttaaaattattattcactgtttctggaatttgcatagactttaccaactgataatcccgtagtgtgaaaatccaaaatttgaacctttttaacaaacaaaaaaaaagttttaaattttgaagtagtgtagattccacattttctgatttggggtggtcaacctgtattttctccctcctacttatacatatgagtgtattataaatggggacattttgttctaaaggaagcatattatatcttttcttgtcatgtctagttgccagtgtgaccactttcttttgttgggaccattactaacctaataaggcgtattgaataaaagcagtgcggtccctcagcagtcagactgctaaaactgagaactgctaaatggtaagcttattgtgggcgtgcctcacccagcctgatgttagggatagtacagtagtgcagcttgacatttcataacgcagtttagaatggcacacagtcaaaaagtgacacactaaaactacggatagtttattcttggaaattcctacttaatatttatgggttgtggttgattacagacttgacaatgcaaaaccatagattgggagagggaatggggttgacttactataatacgatataagcagatccagaattttttgtgccattttggagatttgagtaagtgcagttaaagtcaaagtattggcatctcctcaggtacttccattgtacattggataactcaaataattcatcattactatgagcattcaaaaatttaaagcaaagattgtagattcactttttggacaggtcttttcactttatagttggcagtcatgttaatagtaattggttataattaaattgtggatttataggttctttgtatcacctgaagttactgctaaattacttttttgtttgtttgttttgttttgttttgttttgcttctctgttcctaaaagaagccagctattgaggcagtctcaaaaaactccatgagcccatgcttatgtataaatgtacatggtccataatattttagaattcttctcctgaaggggtgcctttggcttctggggtggcacatcgtatcagtctatgtatctgtattttactatcatagggaaacaaatctgtagaaacaaatgtatgcacatgtattattattactacacccactctttagtattggtaggaataacctttatagatttcctataccattagtaatttggtataattatgaacttgttttgaattcagatgtggcaaagttttgttatgggttgattcacctaatatttgggtggatgggactgtgtaattggcttgagtttttaattaatctttcctttctggttcaatcttgcaggcaactgagattaaggaagcctctcagaaatgcaaacaaaggcaagacattatagagcggaaggatagacatgtaagactctctaccaaaaagttgattaccttaatttaccataacttgttttcaggtggggacaagtagttattataattatttggaaactattcaaaaatcctcattctgatagcttctctgtgagggaaactaagatttgtaagtaagtatagtagatgtgcaaaagataattggaggaaattcctccaagttactcatgtggctacatctcatatgttttatggttttctaattttggtttaaaatgctgtaatttttatagtctttctgtctgtccatctgtctgtctatctattttttacttgacaggatttttctgtgtagccttggctatcctgtaaatcatcctgcttttgcctcctgagtgcagggattaaaggtgtgaaccaccacacctagcttcaaatgttacaaattttagtgttatcatttgactaagattgcttagaggatcttactattttaattccatagataggaggttttttttagggacaggagtggtagggagtgaaatcagggttctgctctactccagcttcccatatacagaatttaagatgtgggttgtggtggtggttttgtacaccttgcagaatgctagttatattgctgtaaggtcactaaatgtagcctttatgactagaatggttctttaattttaaaattacatttatttatttatttaatatttatgtgcatgtaccacagcatatgtatataggtcagaaaaaagcttgtaggagttggttgtcacccaccgtatgggtttttagcatggcatctttacccattgaatccttggcaatccttgaatcttggttttcaatcgagtctacttgtctctggtcttttgattgaggaattgacatcattatattcagtttttattggaaggcctgtattgacattatgttgattttgtgtgtttgttgttccttgtttacttcactgctgtttgtggtagcttcttctttttttgtagcagtgtgcccgtactgtctttttctttagtctgaaggattccttcaggtatcttctctggagcctgtgtagtcataaattcctttagctttttatttttttgtttgttttgtggaaagcttgtgttttttttttttttgttcttaaaataggacagattgtttagctgtgtgtagtagagtgcattggcacatattatctttcaaagttagaaatatatcattccaagcctcccagcctgttggaaaatatgttgtttttctagtgggcctgccactccatgtgattggtatttttctcttgcagctttcaatgtactttctttgttctgtacattaagtgttttaattataatctgtttggtgttctaaatgccttctatacctggatcagtatctgtatctagatttgggaaattttctcttatggttttgctgaaaatgttttccatagatgggaggtttctgtcccaccaggtcctgcagccctttagtcccaaataaacactcagagacttatattacttataaactgtttggccgatagcttaggcttcttactgactagctcccttaattattagctcataactattaatctctgtatttccacgtggccttatcttgctggagaataccctggtattctaccttcccagtagctacatgataatgtctctcgggcggctcctctctgctttcctcttcctagctttgtcctagtgtagtagccctacctatactttttgcctggctacatcctgcctatccattgactaaaacagctttattcatcaaccaataagagaaacatattcacagcatacagaaggacatcccccatcagttttctatgcttttgacatgaagttattcttttttgatcatgatttgttattttgtcataataccctatagctcttgaatgttgtttgtaccttctgttttcgtctcttaattgtctgagtattctaatttcttctaccctgtgttcaggtcatgatattctgtccttcccttgatccattatgttgataagggtttttgtgaagctttttattttacttaatgaatttcctatttctgtcatttcacatttatgtatttatttacttattcggggtgtgtgtgtgtgtgtgtgtgtgtgtgtgtgtgtgtgtgtgtgtgtgtattatgtgccatgataggtgtgtaaaggtcagagaacaacttgtggaagtcagttctgtccttctaccatgtgggactttgggattgtcttagtttgggttttataactgtaaaaagacaccctgaccatggcaactcttataaaggaaactatttaatcagaggtttaatccattatcacaacatggggagcatgatgctggagacatggtgacatgcagacatggtgctggagaaagagctgagagttctacatcttgatctgcaggtagcagaagcaactgtgtatcactctgcgtgtagcttgagcatatatatatgagacctcagagcctgcctccacagtgacatacttcctccaaggctgcacttaccccaacaaggcacacctcctaatagtgccactccctgtcagccaagcactcaaacccatgagtctatgggaaccatacctattcagaccaccacagggttcaaaatcaggtcttcacaattgctggcatgcacttttacttacctttgaggaggctcttaatgagaatttggatatgataagtctttatcttgaacttactatgtacctaacccaagataatcatgaactttggagtctactgtctctgtcgtgaaccatcatctgggtttatgcagtgtttaggatagaacatgggactttactaatttaggtacatccccatcctccatcctgtcttcagttttcacctttgtctgcttctatatgagaattgccctgagtttgtcctgcttagaatacgtgagtttcttagttctgtttaatggttttctgtgaagttggaaaatttgggctatttgtttcttcctgtattctttgtacctctttcttatcttctgaaatactgttttgtatgtttgatataccacgggtctgtacagatacgttcatttttcttttttgttcttaaacggaataatctcaattgactttgtttagtttatttattctctgttaggcttttttagatctttgtttgttttaggggacagggtttctctgtgtaacagccctggctgtcctagaattcactttgtagaacaggctggcctcgagctcatagacatccacctgcctctgcctcccaagtgctgggattaaaggtgtacaccaccaacgcccagctagatctgtttttgagtccctctaactaaaccttgttttgattagaacattttcagttccagaatttcttattggctagttttttagtgtctacatctattgatactgtctcttcagtgaaactgttgttgatttttttccctccatttttttatttaagttagacacaagattgttttacatgtcaattccaattcccactccctcccctcctcccctgccccccactaacactctacctattccataccctttttgctccccagggagggtgagcccttccatgggggatcttcagagtctgtcatatcctttgggatagggcctagcccctccccagtgtgtctaggctcagggagtagtcctctatgtggaatgggctctcaaagtccattgctatgctagggataagtactgatctacaagaggccccatagatttctgacgcctcctcactggcacccacattcttgaggtctggatcagttccatgctggttaatatcggggttttcaattcaattccattggtctacctttctatttttatgccaataccaacctgttttcaggattatagctctattatagagcttgaagtcaggaatggtgatgcctccggaagttccttttttgtacagggttgttttggctttcctgggtcttttgtttctccatataaagttgagtgttattccttcaaggtctgtgaaggattgtgctggtattttgatggggtttcttttagattcagttttcttacatttgtaaaatataaatagatgttttaaataaaatctttagtccatttctgggcttatttggatattttctccattgactttttttttttttccctgtgtggatgccaaactttcttatttcttagactgtattaaacattcttgggttttggtcaaaagtgcatagtttatataacaaaatgtggcaagtctaaaactcagttctcttcctttcacaaaaacatgatgttcttactcatcaatgatgagtatctgcttgtttgtaaatactaaggcttgaacctaggttccctctccaggcaagtctctaccactgagttatatctttaacctcattaatgatgttaatgattgtatagtggctttcctcagtctttattggcttttaaatcaccgttgggttagtcttcttacaactggacagacttctttacatgcctggaaccattatgtgtgccagagtttggagagtgagtatgttggtctatgtcttccccacttagtcttgtcatgttctgtttgttgatttctagtcatttttttaaataagtgttgcctagattataataaataaataatatataataaatatatataatacataaatctataataaatgacttgcggtcatttccattgcaaatacacacatctgttccagtctttacttcctgtttttatagacttcaaggggaaacagatgagagctcaggtcatcctggatatgcacagtcctgtttacgtaggtaccacctggctgccagaatcttccagaggcctaattgaacaacacagtcccagcttctctatttaagatatttgctttgcttgtttcctacaaatgttattgttacccctcttcaagcagctatgatattcagtaattctgctggttgtttatgacaagtgtgttcaggaacaaagttgttttgtgctaggtaagctgtgagttagactggataaagaatactgttttctaggaaactgccatacagaacagataatgacagttctccaaaagttgttgggttcctggcttttactatcattgtgggttattatcgaagatatggcagaagtggggagataagataggtttaggaatggggcatgtttagaactttacaaagcttattacttttaccaagattcagcatgcatttggtttggctagttaatgtttccaagtttgctacaaacatttggttaaagtaattttgaccgtttttgtcattgttcattggttttacagagaagaaggttatagagtttcttatttcactatccctgatgaaatctaaatcttttctatgtctacagaaaagtgttgctgggaatttaataagaattgtgttaaaccttgggggagaattgaaatttttactgttttgagtcttccactcttggaacacggtatgtgtccatttatttagatttttagcattgcctgtttaagtacacatttcatctatgctttgttaggtttaaaacttaatctgcctattccccctctctcccctctccaacaagattctatggatatttttgaatatgtaaatagggatagccttagtttttcttttctgatttgtttgtggtagttcctttttttgtcttactctactggtcagtccttctagcactgttgaataacagtgatgaaaaggctatctcatgatcttaggaagcattgatttctaccactaagtatgtatatagtagacagtagactttttataaatagtatgcactttataagattctggaagtctcgctacaggttgtttctgagaatttttatttggaacaaacttaaattttgtcaagttcccttctgtctattgatatgtttgtattattttcttctttacactattgatatggtggatttgcattaattacattttgaatagtgaatcaaccttacttcccaaacatgaaccccacttaattgtggtgtataaatgtgcacctttcttttcatatatgagcaatattgctaacattttgttaacagattttattttttttattttttttacggtgttcatggaggatagtgttctttagtagttttctttcttcactgtctgggtgttggatagtaactagtttcctaaagtaaactgggaagtgactttctgaaatggattgtgtatgggactaataattctttaaacattttacataattttgaagtgaaactacttggttctaaaggtttgttgttgttgttgtttttctaatgaatgtatttagatggggatggggataaatacttcatacttataaagtcaaagaacaattcgtaggagttggttctttccttccactatgtgggttccggggatcaaatcagctcaggttatcaggcttggtggtggacaccagctgagccattttgcaggctcccttgaaatttattttaaaagtatttaaaattgtgaattcagtttcctaaacatgaattcagattgttcaaatagccactatttcatagtcttataagttttggtaatttgtgtagaaagcaaattggtttgctttgttcaaattatcaaatttatgtgtgtctttgtatccttcagtacatatctagagactgtagtgtgataacatgtgttatttcatgaacaagttatatttcttcctcctagttctctttttagtatcttgccagaagtttgttaattttactgatttacccctcttcctttagcttcattgctttttttttttttttttttttgctttcctattttatttttcctttctttttattcttgtctttttcttctgctgcttgctgtagttttattttgctctttttcggggttcttgagctgtaatttgctgatgtgagacatttgtgagcactcttggtgatatacattcctttcaccacagcttgagctctgccctatacactttgatacgctatatttttattttcattcaatttagtgttttctctagttttcttaggattataacttactttccatttaataaacttttaaaaatagttcctagcttgagactgttaacttctctataagtattcttgtgtatctttgtgtttgcgcatgttaatgttggcatgcgtacatgtgccacagtgtacatgtagagaggtcagtaaacatcagcagccagccctcaccttttatcttgtttgagacaagatctcttttgttgttggccactgtaccagctaagcttgctggcccatggacttctgagggttctcatatctcttcctctgtaggagcgctgggatgacagaagtacagattttacatagggtctgggcttcttaggtagatttctattgctgtgataaagactatgaccaaaagcaacttgggaaataaaagattaatttcacttataactctcaggtcacacacagttcatcattgaggcaagtcagggcagaactggaggcaagaacctagagataggaactaaagcaaaacccatgagaaactgcttactggctagctcctcatggttttctcggcctgctttcctagaaatcccagggccatctgcccccactggactagaccttcccacatcagtcattaatcaagaaaataaaaagactatagacttgtctacaggccgtctcatgcaagcattttctcagttgaggttcctattcccagacaattctagcttgtgacaagttgacaaaaaccaacccacacaggttctaaactcaggtcctcacacttgcttagcaagtgttttaccttctgagccatcttccagccatttgtatgcctttttgttttcaaaggccttatgcttttatttctctggggaaattcctaaaagtgcatttatctttggttgtgtgtttctgagacatctgttgataatttatcataatagtaattgataaaactaggcttgcagtgtctttggattatttccaaaggtctttcgttacaaataatttgaaaaactcatttgaagtagtctcggaagggatagagttaggtatttataggaactgttcttacactgtggacgatgaaaactgcagatgtggtgagtttaaaataagacaagaagaggaactctgattttaaactattctcttaatggagtgtgctgcaaggacataagctgacttaatagtggaagacagcaggaaggctaggaatgtcagtgtgtccatagtagttttgactgccatttttgtggctgtaaatgcaaaattagaccagttttccaggatacattatttcagttgcttagatatagcagaaacatgtagttagatagaattaagcttattcttttccagtgtaacatgtgagttgaggatcaatgggtcttagcaagggaatgattgaatggcatgttatggagcccagttgactaaagaagtaaaggagatgatggattgagatggtagtaaatgggtcagtaaattacaggaccatgtggatttaagaaggaggtagactggggatactaggctgaatatagtgcaaaaaaggaaggttttcagaaatacagctttcagaagctgtgtgggttttggtgatttacattgtctacaatataaggaaaatatcattgaagttaaagaagtaaagaaacacagagaccaaaaaagattgactttctgtgtttaggttgaagtcacatgacccacaggcataatgatggattaaagaagacagtgaatcaggtgccagagtcatcagtctgtaagtagtgagggagaactttgagggaagtagttaattcacaacaaggatgatgggtagcaaagtctgagacaacggttttaagagaaactgaagtagggtgcaatgaaaagaggaaggagagtgattgccatgaggggacctctacccatggccttaaacctaaaataaaggtttatggtcagtcactccttgagtttagtagagaaatatcttccagaaatacccaagtttcagctagaataagaaagtacattcagagagattgagcgatactaaaggaggatctaacaaaacatgaagatatgagatttaaacttgctgtgtcctcaagttcaacaacagtaccagtcgtagtgggactgatgagattattgatggtatttatagtctgctgcaagaaggtagcaagtgtgcgacagttgagaaaacggccaaaaagtaaggagccattgagatgtatttctgttttttaaggtcttaagtttaaagaccttcttttggcaaacattttgcccaatctactggatttttattattattattatttattttaatagcatggtgctgagagtattaaatttatatatgttcagtttcttgtttgtggggttttttttgattttttggttttttttttttttttttttgcttcgacattttaaaatgtttatgtcatttcttgttcttatcctctgacatgctcacttattctcctgaatgatttagattctgtgagttttgtgacttgacactgtgatttcttgtctgtttctttaattttctgtgtgtgtgtgtgtgtgtgtgtgtgtgtgtgtgtgtgtgtgtgtgtaaacgttctattattttcatttctttctctgtgtttgatatacaagacaggatttggcatgtgtttattttcttgatagccccaaatttgaattttcaggaataaattcctaatgacaggtaataaagtgtggtgctttcatatgacaagacatgataactgagactaaaattttattttgcaacaatatgtggggaagatagtaaaaatgctgccagtaaaacttgtgtgatcctatttaatacaaatactttataaataagatacaagtagacattgaagaaatataaaatcttaaagacatttccattataaattatttttatttgctctaagtctgcattttctgtatttttataattaatttattatagcttatattggagaaaagaaataaatgtgagttagaaataaaactgatctatcttaacacaacatcctagttataaaagtaaattaaatgtagaagtatacatttgtgtatatgtttttggtttgtttgggatttttagatttttttttttctttttttaatgtgtatggtgttttgcctccttgtatgtctgtgcaccatgtgtgttcttaatgctctcagaggctacaggagggaaatggaccttgaacctggagttacagatgttgtgaactgccatgagtgctaggatttacccaggacctttgaaagagctcttaatcactagccatcttccagtcccccatttgtgtatgtcttaaagaaaatggtattttttatttttggtaaactatttattttgattaaattctgttgacaagtgacaaccaatacatctgattttaaaaaataatttatactgattataagtcaaaagtttaaatatcaaagttgatgattaaaatttcaatgttaagttgaacttggcagaacatagttttgttaaaagaagattcttttggcttaaaagtaagaagttacaattagtatcatttcttttttaattttggtcatatgtgtggtttatatttactttctgtaaatatttaggcagctggttttacatgtttttatttgccaactattttaatgaccactaactatatgttgttcttaagtacttttgatatacttatctgctagtatacttctctcttgttcttgttgttttttgttgatttttgaggcagggtttctctgtatagctttggagtctgttctagaactcactcggtagaccaggctggccttgaaatcacagagatccgcctgcctctgactcctgaccctatacttctctcttaatgagaggagtgcccacagagtgagtgagtgagtgagtgagtgtgtgtgtgtgtgtgtgtgtgtgtgtgtgtgttgagccaactctaggtcttctgtgtgttagacaagtcagctcttcctatgagcaccataccactgccctaggcaatttaaaactatattattgcaaaaaccgaataaagcaaaagaaaacaatgtcagacactaacctacttttgttttgttagattaaggaacttcagcaggccttaacagtcaaacagaatgaagagcatgaccggcagaagagaataagcaacacccgcaggatgatagaggacttgcagaatgagctcaggactgcagagaactgtgagaaccttcagcctcagattgatgccatcacaaatgatctgaggcgagttcaggaggaaaagggattatgtgaaggcgagatcattgataaacaaagagaaaaggagatgctagagaagcagaaacggagtaagtttcccaggggcaatgaatagtttataaaatggagacttgcttatttcccctaatctcatgctctcatactgatttcttagatcaaacttgagatctttgatccattttaatctgtttatctgaatgggtggtgctccccatcagacccattattattgtgacactcctgcttctgctatcacatcatatttcagtgttgcttaattaactttacatatcttagttttctctgagtatagattttagctcaaattgtcctctctctcatctctctgtttttcgaggcagggtttctctgtgtagcccaatctgccctggaactcactcagtagactatgctggccttgaactcacaaagatccaccagcctctgcttcccaagtgctggaattaaaggtgtgtgccagtaccacctaacctcctttttattattatttccaaaattactgtattagtaatactgacatttgttatcttaatagttgtcagtatcgagtgaacattttgtatgatcaggtacgctgcagtaataccatccttgcttttcatattcatgcctctcctctctgtctctctctgctttctgtttacaaagtgaagttttatttgggaccgtaattgtatgtgctttcctgacagacttctaaactcatttacagccaggtatattataattgaattgcattttattgataagatttttaagggttttaactagccttttttagaaaacagcatttgttgcttatctacaaattaaaaacaagttgttattatttgtgtagctgaacattcagttgccactgagaacatatgcaagtcagaagatagtcttctggagtttcgtaacaagcacttttattcattaagtaacaagcatctcaccagcccagcatttccttaaatttggaaagagaaaaacctaactatttttcatattgttttttttttcaattctgcatcttgctgtcctgcttccatctaaccaggttgtttccaaggccttccctgtggtcctcatctgggatttgtctcatacaacacctgcactgagtaaatctattcctaaattctgtcatctcctcccaaccccctcctcctcctcttctgtttattttcttacgttgttaggtaactttctcagaagagatactgaaaattacacatgaaaaccatatgtgtttttttggattacctaagaacattttaaatttagtattctcctttcttgattatgtattcagttctacactaaaggtggaactgaatatccatttttttttcctctcagaaaaaaagaaattctcatggcccttgctactctctcttgtgctaaaaaaaaaacaacaaaagaaaacaacaacaacaaaaaaaccagctgccctacttttcagtagcttcagggtcatcttaggtgttatttagaaagattttggaagatttgtcctaggtagtatttataacctctagattgaagatactctgtattgtttataggttgatatactaatgttttcagagaaatgatacttttccttccaattttaggtgtgagtgatcatatcatacgttttgacaatcttatgaatcaaaaggaagataagctgagacagcggtaccgggacacatacgatgcagtattgtggctgagaaataacagagataggtttaagcaaagagtctgtgagcccataatgctcacggtaagaaattttacttattttgtggtatcagttagctttactattagggtaaatgcagattttgttgatataagaagtcttatttttgttaagaccctgaggttttttttcttttttgttttgagacagggtttctctgtgtagccttagctgtccagaactccctctaaagcctaggctggtcttgaactcatgagatccgtctgcctctacctccctcctgagtgctggtattaaaggtggacaccaccacccacctaagaccctggtttttcctcattggacttgtagttgcaggactaagtccacacatgagctttttaaagtgcccttgaaccataatagtatataaagccaatggattttttttttttttttttctgggacgaggtttaaaaccaaaggggctggagagatggttcaatctatgaagtactgatcatgcaaacatgaaaaccatagtttgagctccaaaaaatatataaaaagaaggtagacgctggcagtggcatgcctataatcccagcactgaggaagcagacagtaggatctctggccatctagtctagctagatttacaactccaggttcagtgaaagacgccatctcaaaaccagataaattgaagcaaaactgaggaaaacaccctacatcagcctctggcatctatgtgtatgaacatacacgggcacacacaccccataaaaagataggaaatttgggattttctaacctaaaatcatgcctaaaataagcttgcttgactagtttttagattatagtattatattaaaaactgcttaagaggcagaaaactgctataaaaaaaatgttgataagtgatgctcgataagataaccaagaaaatatctcttacaaaagcattctgaggattttgtgaatgaagcaagtgattgatagtgttgatgactggatcattgggaatagaaaagctgtggcaaataatgtagtgaaatttggtcatgaatttaatagagtgagttccatcagactattaagtgattagtttggctttataaaataggttgaatagagtatatagaaatttttcatttaaaaaatgtgaaataggaggctgcatcaaccagatgatctcaagagtgatatctgctatacttgctggtctgcatcttactcctttgtgaaggtgtaactaaaattctcttaaaagtttattttccactgaataccagaaagaaaggagcaggattctaagaaacagaaagttgaagaaccaatgtgttatataaagtttacttaaggatatgcatttacctggaggaaaaagacaaattatccattgatagaattacacaaactggctgttgaccaaaatgactacttttgagattttaaagaattggccatggaatgaactgcttaccaagatgagggcttttggttctcaagtggaaagatatttctaataattataacctggaaaaacttaggaaccaaatcctatgctggctcatccagaacaattatttttgttcattctagaagttaaagtgagcatcagcttacgtttgcattcatttgtacttcttcccataatgaattgaatatgaaaaaacatgcaaaatgacaagccccagatgtttatagagggtgtgcttaaatgattgtatcttacatagatgttgtctgtctgcattcccattttctacacttactgatgttttctggagaatagtatgccaatgttttataacaaacctttttttttttaaccatactatcttttttaaaaaaaaaaaaaaaaaaaccactattagggcctattacatagtaggcaagtgctttcccactaagctatatccccagaccaaagccctgtttaaaaatagcttgtttcatgatatagcatcttttgtgaataccttgtctttgatctagctctcctgtaaaatctaatagcactttctagtatatctttgtaatgagaactgtgtggtgctttcctttgtattttgctcatccgtttgtaataaagatttaatattattgagacagtcctcccctcacctgtcttaatatcgtccatagaagtgagccacttgtgctgaaatgcctaattagtaaatatttttaacatgttagtagaagttgtgtgtggtggtatatgcctatgataccagcacctatgagattgacgtgagaggatcacaagtttgaggtttgcagcacaagccacgtaatgaattgcaggtagaatcacatagtagtaaaaaaaaattatgttgtagtgatgcaaacttttacttctccaaggctcaaataggtgattgacataacaagttttttctatgtattttatgaagggtttttttttttttttaatggttttgtacccattaaactattgccaagtataataagaagtttttgtcaagattaagaaaatcttggccaggtggtggtaggacacttcttttatcccagcatttgggaagcagagacaggcagatctctgtgagttcaaggccagcctggtctacagagctagttccaggacaggctccaaagctatagagaaaccctgtcttggggggaaaaaaagaggaggaggaggaaagtaataagtttagggaaagatgatgagaactgtttatattcgtaggtaacagtctccaacttcagtgagttaaccagaagaaaactaaagctctttctaagataatttaaaactccttgtgcatcagatcttcatgtgtttttctgagtaacaaataaaatgttttgaaattacttagcagtaaatttaatctgattaaataaatccaagatatattgcatacactctaatatcagtggatttcagaaaaactaattttccccttttttagattaatatgaaagataataaaaatgcaaaatatgttgaaaatcatatttcatcaaatgacttaagagcctttgtgtttgaaagtcaagaagacatggaggttttcctcaaagaggtaggtactaaccaataatatgttctcattgacatggccccttcttattttctcctttatgggtttgaattctccttgtgtattctctggaaaaatatccccttccttatcctcagtatacttactcatttttttaatgtaaaatgacctgaaagaggttttagaatgttaatatgtgcatcacaagtgaaaccccttcattctactgcctcagcattcattgttttatgttttgcaggatgtaaaacgtatgtggttcaggtttggggtttttttgtttgtttggtttggtttagcttgggtttttattccctttgaagtagagatttgttgtgttgttttgttttgttttgtttttgttttgtgggtttgttttttttttttttttttttttttggtttgatttgggtttctttgaaaccaagtatcttactcacctaaaactcaccagttacagtaggctggttggccagcaaagtccaagagatcttcctgtctccaccaacccatacctccctaaggcagtacaatagagccaaccctgttagtgcaggtgtagatgaaccagccccaaaactgtaagcaaaagagagctgcccccatttctcatctgtcttatggaggcatggatgtgggaagtagcccttcccacacccatcaatgcctcggacaaatgggaggtctctgtacctgtccaatgctttggttatagatacatgctgccctagccagcttttatgtgagttaatgttaagagttatgaactcatgagaagtactttatgcactccctagcctctcccgtccagcccccctcccacttctgactgttgctttctcatggtccactggaagttttccatgtatttatggttgaaggatcagccaaatattaaaacaggtttgagtattctgaggtctctcacttggcagaatcctgccaagaatttaccctttcatttacatagccattctggtcaccacagatgccatcctctgatttcttcaagccacagactacatctttgtacataaatttccattcctataactctcctgcttgattagggaatgttctcaagtcacataaactcagattgtagttagttccatctctctagtttgttttccccgtgctttaatagttattatttgaaattttgcctagagtttataatcatttttggcagataggtaagtgaaataatctgttttgttgttgttgttattgttgttgtttttaagataatttattatgtatagtgttctgtctgcatgtatcactgaaagccagaatatggcatcagatctcattacagatggttgtgagccatcgtgtggttgctgggaattgaactcagaatctctggaaaaccagctagtgttcttaaccactgagccatctctccagctcaagataatctgttattcatggaagtatagctaccatctatatattttgaagccaagtccagacatcctgtttcatctgaaaattcagtacatatttctgaaagaaatggactctcagattggtgtaggggcacataccagtaatcccagcccctgagaagctgaggcaaaagatagggagtttgaggctatcctggagtacatagtgagtttctgtccacagaataagtaagaccctgtcttgagcagggaaatcaaaagcagaataacccgtaaagtagaaaagctcataatgaatttaggggggtaaagttaaagggaaattataaaagataatgctttgcttaaatttctgatcatcctagcaatgccagtgggaatatggttaagcacgtggtaattaatactgtctttttcctgaatttaggttcgtgacaataagaagttaagagtaaatgctgttattgctcccaagatttcatatgcagacaaagcaccctcaagatctctgaatgagttaaagtaagttgaaggtattattagaaataatttgaacactgaataattttaaatgacatttaattcttaatgtaatatgtttgttataagctgtattagatctgctgaagtgtcaggttgggaaaagttcaggcttaagaatatgccaaatctcatgttccataaaggtgatttttcaaattagtagagaacggtattggattagttaaagaaacatactaaatgtcttttactaaagttaaaagatataagctagccattggaaataagcagtaatgaatcattttctaatgcaaaaataatttctgtgacaagtggtggtggcacacacctttagtcccagcatttggtgagggaagcagacagaaaacacaagcttccttcttccatgtccttttatgtgggctgccaccagaaggtatggcccagatttagggtgggtcttctgacctcaaatgatccaaccaagaaaaggtcctcacaggtgagtccatctgttagttcaaggccagagccagggcttttaaatagaaaagccctgagttaataaaaccaaaaattataatattaataatttctgtaaggactaaatgtaaagaaacagttttatacaattatatgtaaatatctgatctctggatataactagacattcttaatataaaaaaggtaagaacaggaacaggaaaaatagtctataaaaaatagattgtaatcataaaaggcttaaacttagcagcaaagaagaaaatagaacaagtgattttaaaatcctctaccattgttaaaatgtcttagttacttttccttttttccttattttttggatttgtttgttttgttgttgttgttttgagacagggtagctttgtctgttctggaactcactgtgtaacaggctggcttccaagtgctgaaattaaaggcatgtgccaccacttccagctttagttacttttccattgttatgaagagacaccatgacaaagacaacttataaaaaaaagaatgtgattaggggcttgcttacagttccagaggattaatagaatccatgaccaccatggtgaggtgtgtggcacctggcaggcaggcatggcacaggagcagtagctgatccactggcacaaggcaaagcgagaaactgggcctggtatggacttttggaacctcaaaacccacccccaatgacaactcctcctccaataaggccacacttcctaatccttcccaaacagttctaccagctgggatcaaatattcaagcatgagcctatgggggcctttctcactcaaaccatggcacagtagttacttactgcttattgactgcttgtcagaaatcaggttgtatgtctgaggatacatgcgtgtacctctggtgacaacctctggtttgatttctcatacttttccattctcaaatggtttttggtgtgggggaaaggacaaaatctcatactgtcctggaatgtatccagtagggtagaccgtgttgcttgaagccccagtgatccaatgtctccacctccccattggcataataagccaatgccatttgcctggagattttgtatgggtagtgggacctgaacttcagtccattgcacccagactttcttgttgtacttgcaaggcaagcatttcatctgctgagccatctccttagcctactaatcaggtttttaaagtaatattttaagaagaaaaaccaaatcagtccttttcttttcagacagtatggctttttttcatatttgcgagagctatttgatgcacctgatcctgtgatgagttacctttgctgccagtatcatattcacgaagttcctgtgggaactgagcggacccgagaaaaaattgaacgggtaagaaagtgaagatgtagaaactcttcgtatttaacagttgtaataggacataaaactgtggctattaatgaccattttaaataacagaagtgaaacaagttacctagaacaaattaataaatacttttatttttagaagaattgagtaaagttaaaacctggaatgcctgtatgctcttagctgtttctgccttgcttgatatatatatggtaatttaatctttaaaaatcttatactctgccaggctgtggttcacacatttaatcccagcactcagaagccagagtcaggtggatctctgtgagttcgaggccagcctggtctccaaagaaagttctaggacaggctctaaaactacagtgaaaccctgttttgaaaaaccaagatggatggatggatggatggatggatggatggatggatggatggatggatggaaacatggatggaaggaaacatggatggaaacatggatagaaacctttcactctagattagattatctttcaagtgtacttagaatggtagactgggatgtaggtctattctggtaagctttcatcttcttaaagcttttatttaagactctctcaataaacaaatggccatttttcacaagatcttattttcttagcagatatatctataagcttttttgtaagcagggacagaacaaatctctcttagaacaggcttttcttttttttatttgtaagaggtttgttgttgttagttttgcttttgctttctgagacagaatgtcatgttcccaggctctccttaaaattactgtgtagctgagtctgatcttgaattcctttatcttctttctcagcctcccaaatgctgaaattatagttgtgcaccatcatgaccagcatgggctgtttgtttgtttttcatactgctaagtttatgttttgatactttttgtgaactgagaattaattacagacctaccttcagttctcttcattaccctcctttatgttgtttccaaaacacttacctgagatacattaaaccacatttcagagatgttggttaggtaatgttattttatgtctggtatattagtcttctagaattctcctggttcatgtttttaattctttagtcctttaaaacatatatcatagtttttattagaatgttcatgaattcctactttacattataggtaatacaagaaactcggttaaaacaaatttatacagcagaagaaaagtatgtgttaaaaacttctttctattcaaataaagttatttctagtaacacatccctgaaagtagcccagttcctcactgtcacggtggatctagagcaaagaagacacttggaagaacagctgaaggttggttcactgcatagttattaagttgttggatgggtttttaatactttggaactttaaaagtttttgttaacaatttgcatatcccataggaaattaatagaaaattggaagcagtagaatcaggattggtggccttgcgtgatacaaacaagcatctcgagctcaaagacaatgagctaagactgaagaaaaaggaacttcttgaaagaaaaaccaaaaaaagacaactggagcagaaaatcagctccaagctgggaaggtatcttgtagctttgaatggggatctcagcaaaacacggcctgagtgcctactagttaattaattaattaattaatcctataattaattaatcctataatgtcaacaacagtttagagtaatttctaaagttgtagtattaatgctcaaattttgatactaaaagtacaattgtgatgccaagggcaatcagactaaactgttttctttctagtcctttgacccatttaatgcctatgtgtttagaaaacagaaattatattggcacaggaaaatggcaattgtaggttctttcctaaggcctgtgacctttccagccatgggtaattgattaggtttataaaaccaggcatggaatacctcctattaagtggacctaaagtccaattagatagttattggttaccgccaagataaaagtgcactgttaaggatattttgcttgtctggtaaacatgccaacaaggactggggatatttcacaaggcccacctgtagataaagagctacaagtagtcaatggctgctgagagagggggaatcagttttctctggggaagagcttcttgatagattatctaatcccagtggtcagccctaaatacatgaacatatgaaaaacgttaatggacacacacacgcacaggcacacgcacacacacgggtgtgggggtggggataataagtagtgaatttgagagggatggggcatagagtagttggaggatggtaagggagggtgtggaaataatgtgatgcagtaagtgtactaatttcttggaaaataaatttagcttaaaagaaatcagaaaatagttttttttttttgaggaagaaaacaaaagtatgttaggaaacttttctttgtgtctaatctttttaagcaaatagctgcttctctaggttttctttttcaacttttggccttgtttatcaccttcaacccttcactttaatcctatcttcaactgttgataaaccacttaaactttactgtgtgactccacttaaactgtggacatattgcttaaaacttcatttaaatctgattttactaacacagtgacttttccatgaccagcccactagttttactcgtgtcctttgtatactttgtgctcctgtggtgatggttggtctctccatgcagttcatccaaaatactatcgcaaaagccttttttatttgtactttaaaaaaatttgccagcctccacctcgtgcttcataagacggcttccatagttactcagaatcgtgttttcctctccagcacctcttccttgtacaccgtctactgcacttgatgcttcttgtttattactacttctgtcctttctttagccccttggagggaggcatcttggcttagtgggaaaaccatggacaccaaattagtgttaaacttatcctaccacttaatatccataaacttaggtgatttacttaacttttcaatctttgtttcttaatctttaaaattattttaatgataattttaggactcttgtatgggggtcaggcttagctcctgtgggtcaggctggcctcacacttgctgtagagctgagagcccttaaacttgtgatattcctgcctctgcctcatcaccactcctgattaatgctgctgggtgagggggcggggcattgagtccaggtcttcatgctttgttaggcaagcactccaccacctgagctacattcccaaccctgtgttgatttttcttttgtttttacctatgatcagctctacctgcttaaggattgtgtttcatgagcattgtagtaacaacttatattaataaataaattctgggtcacgtattatgctatgtgtgtgtgtgttttctccaaagttcagtgggaagaagttttatgctctacagtttatagatgaaaaggctagagctgtaaggtttaacttgtcaagttctgcttattggtgaataacaaaggggaaattcaagctccttttctgactccacattctgcatcagcaccattactaaccctagactgcactggtcatatagcaccacaatatattttgatcctgagtgattgcattaagagatgcttgatctaggagctagcattttttacttctgattatcattactgtgtaaccaaaaaagttcaggggacctaaggcttttggcttgatcctgtatttagttctgatctctccatcattatgtgtgtttgttgtacagtataaggctgatggaacaggatacttgcaatctggaagaggaagaacgaaaagcaagtaccaaaatcaaagaaataaatgttcagaaagcaaaactcgttactgaattaacaggtctagtaaaggtaagatattttcttaatttttgacatttttttaaaaaatacctgctacatactaaaatttagtaatttttagaggattttgtgggaaataatctcttaagtgtttttctgtcttagtaataataagcaagagatttttataattagtttaagcttatagagaattttaaacattaactcattaggctaaattatgtttttcagatgacttaagtatataggaaattacttttttaaaagtagttttacactgaactattttgtggagatatcagtcacagaaggaagatgttcatttttcttgagtcataattttttttgaaaaaaacaactatggtgtttttcatagttgtaaaacataggcaacataaaaataaaattcttacgggttgtttgtttatagatttgcacctctttgcatatacaaaaagtcaatttgattcttcagaatactacagtgatctctgagaagaacaaattagaagcagattacatggcatcatcttcacagcttcgtgtcacagaggtaatatatttttgccctttttttaaaattttggaatccatcttcaaaccagtttgaaagtatatattacatactatcatttgcaatgtgcagttgttgtatactatataatttaaatttgagtccagcaaagtagcccattggttaaaagtgcttgccacataatggcgatgtccaaagtttaatctccagaacccagggaaaggtaggagagagctgactccacagaactagtgtatatacacctgtgctctcatacataataataatcattattaataaaataaaacaatacagtttgttaataagggaacagtacttgatgtgtaagagtgggttgataatcacaacagtataaccttaactttaatattttgcagtagaatgataaaattgtgcaggcgaaagaagtggggaataatacacaaacttaattctaaagatgtagcatcaaggtggtagtgacagttatttttcatttttgtttttgttgttatttagtttttaatcaccaaattcctttctcaaaaatagaacactttttcttctaagcattcatggacaacctgtgcagtaacagaattgaactttaaggaatccctgtcagttatctacagtcctgttctgatgctgaccacatgaatttagcaccaaattggacagtttataaagaataccccaggcagggcgttggtggcacacgcctttagtcccagcactcaggaggcagaggcaggcggatctctgtgagtttgaggccagcctggtctccagagtgagtgccaggataggctccaaagctacacagaaaccctgtgtcgaaaacaagcaagcaaaaaagaatacgccagtagaccactctttcttaattcactggctataagttcaagcatcctaaaccatctgtacttctgaccccctactgcaaaaccctggttgtccatggcaccttcatggttggtaatttactagaagaacacaggactctgaacaacactgatttttatcataaagagacatatagaacaacatctaagagggtcctgaactgactctcaatgcccttcatgagtcatgctgtgtcactttactgatgattctttgtgcttgccatccaggaagctgcatcacactgcagagttcctattgagtttatttcatgagcatagttgcaccattagccatgtggttgtgctcagtctccagacctgtcttaagtttgggaagtcattttaagtgctgatgtcatatggttcaaaactctctaactataaggttagtctttctggcattgcccattaacatcctaagtgagttcaccccttaaaataaatacactcaggtgtgagccaaggaattcttgaataaataataatctctcagcactcattttcaaagactaatcatattcttcatttccacttgagaactccagaatgcatggtgcaacgtaagtctataggaacatcaaaactatcctgaatgttactaagaaccctaaatcaaactgccagcaagttctctctcttgagatgaggcctcattaaccatggaaaggtcagcagtccagtatgaaaagagctgaaactgagagaggtattccaaactagagagcagtctaataatgttggtattgtctagacttaagaatctcaaactcctttgaaaacctcactgaagagtaagagctacattatgaagggacagtgatacatgtactaaatgcagttataaatcagatatatagctaaattctctgaagaggaaaagtatgaataaaatggcatatatttactgttggttgttttagataccagtattattatatcaattgatgctttaggatagggaaataaggagtgtttcaatatttttcattgtgaggagccaacaggtaatttctctcccaagaaggaggtatgaatagtatgtaaagtatctgcacaaagttagtgatatacaaagaagaggtgttaagagcagggacagtagaactcaagagtagatgtaaaaattactgctgcaaaacacgggtggaattaaagccaggcagatgcatgactacaatcacaacacttgggaggctgtgagtttgagtttaagagattgagaccagcataggcaacatggagccccatctcaaataaatagccaaatatacatcagattattaaatttaaatgctacaatttctctaccaaaacattttttaggcaaattctaacatcaacagaatatgaaacacataaaagaaaaaatgtttcagaaagggaaaaagtagaagaatcatggctacagttatctttttagagtggtaaaaatataacattggatttataatatttttacagatgtgtagatttactaataatcactgactagtacacttacacttatgattttatataaattcatgaagtctgttaaggagtaggaaactaaagtcttatctctttattgggaaggtactgtcatcttacatatattactaagtgaaaaataaaaaaaggagatgtatatagtatttccactttgtaagaaatggtcaggggagtgtggtaaagccccacggggacaggccagtaactttcctccttgttcatggggtcgaaaatgagcctaatctatattccttttagtggttagggttttttccctacgttgaaataacctacaaataaaattaatttttcttcaaaacaaaagcaaaatgaaacaaatacatctaaatttgtgttaagttagcagcatagcctcacagagaaacagtattccagaataatttgattctaaacagaaaaggaatttcaaaaagcatcttaacctgttttcagtaattaagctgctagtatctgtagtgttgtacaagtgaagaaataaatgatgccattggaatacttagcctaatagaaaacagtttcagtgtaaaataaggatgttaaataataaaagctttgaagactgagttaggaataaccaggatagcttcacaatgtattttctctaaatggggctgggaggagtgggtggacaagcctggcatggtggtatatggctttaatgcctgcacttaggggactgtgtcaagtaaatttgaggacaccctgtgctacatagtggactcttatttcagaaagaaaagaaaaatcacctgccaccaagaaagtaatacatttcctcattccatttgcatggcctcctaagtactgttttgtactgaaatggctcattgggaaaaaaaaaattgttgattccaagtctaggaaaaaatatgtatgtgaataattttaggtaaacttctatgattttgtcatgcatgataacaaaacaaagaaccccagatgactcttatgatcttgttagactttttttattttttatatatttgaattacaaacaagattgaattacatggcaatcccagttcccttctccctcccttcctcctctaccacccccccaaactaaaatcctacctttcttctaatctacacctgacttaaaatttctgcttcctcgtgacctctgcatctttccttttcttcccttctcactctctttgctcaggggatggtgaccctttcccctgagttgaccctttcttggatctcgtaagactcttaagtggccataggaatgtaaattgacatttagaatgattctttaaaaatcttactagattagagaatatttagaaaagccagtttactattttgaataattctggaaaattaagcattcatttgtttgtttgtttttaaatagtgggggtgggataagtgaagggcttgctttttttttttttttttttttttttttcccttgactagcctaaaactcactatgtagaccagactggccttgaacccatagaaattcacctgcctttgcctcccaagtgctatgattacagaggtttaattgtttatgtgtgtgcatgcatgtctgagtgtgtctgcaatgtttgtgcagatgcctgcagaggccacaagagggtgttggctccccaggagctagagtcacagagttgtaatcttctgcaagagcagtgtatgctcttaattgctgagttatctctccagccccatttcacacatttcatatgtgaactattcattattagaaatataaaaataagtttgattttataaacatattttaactgataaatgaagaagaaattacagtattagagatatgtgtcctgatgacatattatcacttttgaaatgacactgggaaataatcaaatttctgtctgtataatatataatgccaagcacagcaccatgtctggaacctagtgctgagggagcagacaggtgaatcacttaataactttttatgcagttttatgtatccctcacctgaaaaagttagttctcagaagcatttctttcccttatctgattcagattttgtagatttgtattatacatattgaaatgcctttgggatgggatcaaaggcaaaacacatcacattatgttttatgtacacatcatacacataacctgataccactgtctgctacaacggttttgactttggcttaccatgggtaaagaaagtgaggaactttctacttgcggcatcataacagtgtttcagattaggaactcagattttcagatagggatgctccagctatactgcagatttctttaaacatagatcataacttgcaagcttgtgtattaaaaagtcagtttaggactatgatttttaaatcccaaatggataggaaaatttcaagttaacatttaagaaaaatatctaatgattttcatattttcagttatgtgttgtgtctagtattgaagacacggttagcagtcaatcagattggagctggaatgtagggacagtcaatcccatcactgaaagaaatgaagaaataatttatagccagtgttttactaatggcatgcacctagaactttaattctattcatataggaagtagtttttattttgtttgaatcttattttatttaatgaactgttaagtcaagcaaaaaaaaaaaaaaaattcagtgaataattctttcttccacaagagggccttccaggaaaagcttctccttgtttagtactcgtcgcagtatttctgcacaactttcataacaactcaactttgtatagaaagaatttcagaggacagataataatcatctcttcaagatatatacttaatttttttctcaactattaactgaagatgttttgtaaagtttgaaattgtttggttttatggtgaaaaggtgtctatttggaattaggcagctagactcagcttagatgatcccagttttgttggtaacatccagaatccagatcataattaagagccaaccaaacatatgccttcttctgtctgtcaagccttatgagagtgtcgatgttggccacatcaatgtcagagtttcttgacagcctgtttgatctggtgcttgttggccttgacatcacaatgaacacaagcgtgttgtcttctttcttcacgactgactcagtgatgaaggagaaatttatgatggtatagtggttaaccatgtttctcctgggctcgctctttcaagggtatttgggctgcctccagagccattgggtcttgggccacctgaaggtgatcttctttttgtggctgtgggtgcctttcagcactgctttcttggctctcaaggccttccactttggcttcggctttgggaggggtaggagcttccttccttgtcttcggctccatcttggccaaaaggttttgtgttattttctgtactcagttgtctatttaagactagagtagaagcaggaatccaattaagtctttgattaacttgactttacagctctatcttatataaatacatattctctcttttttttttttttttcatcccaccaacaaagatgaacaagaatttgctttaaagtgatggggctcctttcttatttaactgccatgggacttaggctgtttttggccaattcctcgcttccccatatcttttgttattttttaataagtttttttttgaaaattttgtacatgaatgtactacatttatatcaattttactccctttccaattcctttagagttcccccaattccttcccaacttcatgacctcttttcataattataattgttacatatatacatacacacatgtgtgtatgtttgtgtatgtgtgaacatacaacctatttagtccatctagtaatgctcatgtgtacatacatttaggtctaattacttgagactggacaatctgtaagaggtctcttccactgggcagtggtggtacatgcctttaatcccagcactcagtgagatctctgagattgaggccagcctggtctatagagtgagttcccagataggctgcgaaactacacagagaaaccctgtcttgaaaacaaaatagaaaaaagtggtctcttccttcagcagccactgattacctatatatagttcttcatctaggtgtggggccttatgcattttccctatcccctttggtgtatccagtggtgtggtcagtgtgcagatcttgtatggacagccatgttcttgagatttcatggctatagtatccttcttacatctcagtatctttcagtaggcatcccagtcctctggctcttaaatatttccactcatcttccacgatgttccttgagccttaggtgtggaggggaaggctgtattatagatgtactgattgtatctgtgtacccttgattcgcttgttctttacattttaacaaattgtagatctcaatagtagaacagtgtggacagagtaagtaggaaatggaatgtaaaaggtcagagtggctgaactgtgccaactgcaccgttttaatggaaaaaattactaagaagcagttataagagaaatttcaaggatagaagattatgaatatataatcacggaagcttcaaagatgttcatgttactatgtaacctaatatggctggagaagaggaatgtagaagtatataaaaatttagtcttatcaaggtggacaaagggcagactttaaagtttcatgtgcgatgaggagggccacctaatctatctaatgccacttctaggccactgttctacagattagtcaattcagtacccattacagacctaggaaatgtgttattgtttagatgtggctgagaggccctgaggctatagaactagagttgaggaggtttctaataaaacatgtttgtcttactctgtactaaatttcaaactagtttccctatttaaaaacaaaaacatagaagtaatgttttaatctgttttgtttttaagtagagaaactaaaataaaagtaagcctttatctaagtacttattactatggtttccttgaataaattcttttagcttgagagaaatgaaaaaaaaaaaaaaatatatatatatatatatatatattaaagattcccagttgccctactttactctctaaggaccattatacttaagcaatgcaaagcaaaggacagctgggtagaactcaacattcctaaagaattctattcctatttcctgttcctctggactttgctaaaatgaaatattaagatattgtaggaatgaaataatgagctgattatctgaaggtctaaactgactgagaagagccaaaatctcatttaatagtttccttctgttgggtggcatttccctaacaaagtttttatctgggaaaaaccttactatacatacttgtttgtgacattatctcttgacaaagcccctgttcattttcttttcatttttataatgtgctttcattgtcattattttgacaaggaagcacatagttaggcatatgtacacaaatgtataaagtatatatgcaaatgtattttacaatacattttggatacagaagggagctgctaagaatgcatttaatagattataaacatgaaagtttcaggtgggggtgggcatgcctttaatcccagcactctggaggcgaggcaggcagatctctgtgagttcgagaccaccctggtctacaagtactagttccaggacaggctccaaagctagagaaaccctgtcttgaaataaataaataagcatgaaagtcaatctgaattagaatgatttaattaatcttttggagaaagacactacataaaaactaatctgaataagtaacttgaaatgtagattttaagtttttttggtaaagctaatttaaaatctgatcatccctctgttgcccagggtcatagagatcctgtatagattaagcatggtaccttatgcctataattacagcacttgggaggtagaaggtgaaaaatgaggaatctaacattagccggggctacatagtaagtttgaggtgagcctggattatatgaaacggtaactccagggtagcgggttctttttttttcccttttggtttttaaaattatttattttgtttgcttgcttgtttttaagagtatgctataattacaacattgcccctttccctttcctcctctaaactctcctacataccctccccactccccttcagattcatgccatctctttgtaatctgttgttgttactgcatgtacatatatgtattttcatatatgtatatttcatatatttccaaatataactcaatataattgagttcatacattgttacttgtatatatgttttccaggttgaccttttggcactgaagaaccaatttgtgtgcccttaagtgtttattgcaaagacccattgttctggtttgagtcctctgctttctgttgcactatcaatgctgggccctcactgggactcctcttggatatcctgctgttgccctgtattgtgggaatcctgcagctttgggtctgcaggattggtcccttaacatgttcaagcagacatcaatggggtgggccaagtcatagccctggttctgggcatgggtagttgcagggttggtcagcccacaagctctcccctgtctttaccacctaggtgagctctttagcattgaccttgctagttcaccccttgccgagggatggaaccagttctcctgctctcacatccacagggtcagctctcccacacctatacctcagaaccagctttattgtgttgcccaggcaagatgtagggaccactctcccatgtattgcagctggtgaggggcagggacagcttttgatcttaacaacctcagggtcagctctcccacccgacacaggcagtggggggcagggggcatcatctctcccctgaatatgcgggacagaaccagatctcccatgctcaagtgttacgataaatctttctgctaaaagcagcctgagccccaccgccacgtgggcagtctccgccagccgcctgagttctgcccgctgcgtggatggacaaaataatacagagacatattaggtataaagctgcttggccaatgactaggatttctcatctgttagctcagtcttaattatcataaatctatatattttataagacttatcttatagaggatgccttgtgctggctccctctcttacgggtggatcacatgacgccgctggaggaagagcggaggggaaaagaggacacttccttcctgtttctccttgctcaaatatgagtctccttgctatgtcacttccggcctggatcacttctctactacatttcccagaatcctctttgactcctagtcctgtctaacttgctgtttcattggccaaacagaactttattaaacaatcaataaaataaacatacacagaagtacttcccccatcactcaagttcttgggcagttcacctgcacccaactctactatgctgcccaggtgaggagcagggcccacgttcctgagggctgcttggggggtggtgaggtcccttatctgtcgaagacagtaaggggcaagggataaggtgggggacatctctttctggcccacactgctaaatgacagacaataatggggacagctttcccacgatcacagctttggggctggctcaaccacacctccgccaacaggcttggctgtatcgtgctgcccaggtgaggtgcagggcctgctctcctgaaaactgcagctggtaattttatctttcttaatatatgtatataggggttggggaatgtgcacatggagcccagagaattggctggagttacaagctgttgtgagccatctctcccttttcagcctattactgtatagtgttgttgttggaaataaaagatataatgtctaggcaaggggctgtgtgtctataatctccttgcttagaaagcaggagaatcaggagttcaaggccagtcatggcaacataacaagtttgaaaccagccttactccactagcaccaccccaaaatggaaaaaagaaaaggaaagaaaagttagatgagaagcacctatgcaagggcctgacaaacaagcactcagtgggtagtgcctatttctgttgtgatgttagttcaccttgcagtatttaattcagattgtaatgtgtgtatctcatagatcttgcaaattatttggtggagaaattaataagtccatgaataaatgataaatagataaaacatacttggaaagttatcaaatattttttaaagtacatttaatgccgtgttttcttattgaagtcaatgtatgacaatatttcattaaaactaaacattcagaaaagggtaaactttagagttcttgtatattagagaaatattggctctgatatattttaaagtttgctttaaaactttacttttataataaaaggctaatatacctttataataaaaagtcatgattcagacaatgtggttatcataatcagaattcagcaatttattggattgtgattgtttatacaagcctctgatttagtagtaacattttgaaatattattttcttaacagcaacagttcattgaattggatgacaatagacagagattgttacagaagtgcaaggaacttatgaggagagctaggcaagtatgtaacctgagtgcagaccaagccgttccccaggaatttcagacagtaagtataaaatatataatgctgcagttgccataacacagtatttttaagtttaagatatcctactctagacatagtaacaggacatgaaaaacatgaagtgttatttaaaaatacacttttccccattcttatgctgattatcatatacataaagtaactttgtttaacttacttcctctcatatttagtcaccagtctttgcttagtattaaaattcttaaaatatgagaattttcttaaaattacaacatagccttcatttttactattaaagtagatctttaccccttgaccatctttgagaatatagttggcagtgtgaaatattcgtggaaactggttagtttgttcttttgacaaatgcgatatttagaaaaacaaaggcaaaaatattttccttagaagtcctggtgtttaattagggcacatcaggtactcaggcttcagaattgatactttctttgggtcatatgctaatatgtcaagagtccaaccaagcaatgctgcctttcagttcacactccaccattgatgttgccccctgtgttcctaggctttatctgacattgaagcctttctgtgtacctactcaaactaatatcaaaatagttgctaatgcattttcggtagtatatctgcactttgtaagatcttaaatatatcacctttcatagataatgaaatgtccactaagcatggaggaagactaatgtagattgtagttgtcagaccctgggagggtgtattttatgctctcagacatagaaaccaagcatgggtttgattggatacagagtcagatcaacagaaatttataaaactaattgagtagtttgtatctaaagataattatagaacacatctaaaatgtgttttgttttaataaaattggtgtgatatctatactataagttacagtttttgtgtgttgggcatggtggcagttgcctgtagtaccagctcttgggaggtagaggcaggatgagcctaagttcaaggtctgcctggactacatatagaactaaactcttctccaccctgccttctcacaagttatactgttttaaaaaaataaaattagaaataatgtatttattaaaattggttatctgctatgaccaaatattaagtaggacagacatgcttctgtcctcactgaaacttgaactctggtctggagaatagaacaaacaacatcaaaacaaataggtaaggtcaggcagcaagagagactaagaaaaaaaaataaaggtgatagataaagtagcagggataggcagttgcttacagatggttcctttgagactacatgatgagaagtcagtcaagtggggctatgaagcaaagtataccaagcagagaaaatagctcatacaaagccactgaggtgcaaatatatttagcttgtgttaaaacagaaggaatcttgatgggattaaaaattacattccttgatgggcatgatagcacactggaatcccagcactggaaagacagaggcaggtggatctctgtgagttcaaggacagccagggcctgctacacaggggagggaggggggaatgcattcccaaaatttgagaagcagagtcaggcagatctctgagtttgaggccagccagggatacacagagaaactctgtttcacaaaacaaaaacaaaattacattacaagcagagaggaaggcacaagccagattagcatggccttatagagtatacaagaagttttctttctccctatagtgttagagattaggcaggtacactgctagtctatgtcctcagccctgggttctgttctctttgagatagaaccccactgggggaatttaaatgcaggagtggtattatgttcagtttataggtgaatactcttaactgttcttgaagaatagatctataagaaaggaaacaagaaaaccactttgaccattattattttgactatggaagagattacattagcacaaagggataaagaaagagggacttttactttagtgatgggtatgagagaggtaagggagaactcctaaatgtttgcctggacaaactgtgaagctctttactgatgagaagttgatttgctcacagggtggggaaggtggatgaggtagaaattatgtttcactatcataaatttagtatgcctgttagagtctggtaaagatgccatcaagtaagtgttggaacataagctcacacacacctcaacagacaagtcaaagatgtccataacaaataccaagaggcttttgtagaaactgttctaaaaggttaaaaaagatacaaatcaaagttacccaataatatatataactcatcagaaccttttttagggcttcagattcattgcataccttttactgtgtagctctgcaggttgtgctaggcaaaacagtgtactgcatgcctcttcttgtaggaaagtatctatcctaatgagtctgtggcatagattcagaagatagtcttgatgaaattctgtctcagtgattgaattctaaggatgcttttgtaggtcttcatgagtacagtataaagttctaacttcttgctctctttcaatgccccacatattctggacccattctaccaattcagcaagtacccaccattccaaatggacacagctccacaccccccatggtatgcagtactcattcttttttccaagtcgttttctcctttttgcattgcttttccctagccattgctttgagacctggagataaattataggcctttgaattcttttaactctcatgtagcatgaactgacacttcattattttaaattccaaagcctatataatatgtactgcttattttagactcaacatcaatacattgccttaaggtactatccaacatgtatacattttgttttcttttaaagtgtaagcttgttaaaggcaaaattccgttttaagattcctttgtattgctgtgtgctagcatgctattaatcagatagtagacatgtagcaaattactttcttttaactatcctaataaaactttcagtattccatttttaacgatagactttttttctctctttaggctttccaagatcttccaaacacattggatgaaattgatgcattattaactgaagaaagatcaagagcttcctgcttcacaggactgaatcctacagtatgcctctttctctgtttctatcctgcatctctcatactgtgcactgtgtaccttccccagtgcacacatacacatgtgcatgcatgcttgcgcgcgcgcgcgcacacacacacacacacacacacacacacacagagctctctccagtacttgcctcccactctgtactggagctctgggtaataataagctagacagcaggaacaatgccttaaatgccagattctgaatctattagaattttaaatagagtcttcctacggaacacagtgttctgtgccttttctttataaaaagaatagttgagttaacttgaaatacagcagtgtgtattttttccaaggattaaaaagtagcactttcagagtgcaatagcataaattaattgcatacaaacaatgcaatgcaattggcgtttttagctaactgcttaattgatgcaaatttttatataattttattctttgatagatttttcttaaagaacttttttttttaaccaggtggttgaggaatacacaaaaagagaaatagaaatacaacagttaactgaagaactaaaggggaagagagttgaactagatgaatacagggaaaatatttcacaagtaagttttcatcttttttcttctatgttgaccattgatgggattagcttataaattatgcaaaataaattttacactcctaagagaaaaagtattttcagaccagactgactgttaactaatttgttttatgtaaagtttgatgtcagaatggataatactgctttcactttgtgcttttgtcttttatttgtaggtgaaagaaaggtggctgaacccgttaaaggagctagtagaaaaaatcaatgagaagttcagcaacttttttagttccatgcagtgtgctggtgaagttgatcttcatacagaaaatgaggtaattgcattggggttgtattttataactactaattttgttgttgttttgtttgtttgtttgtttgtttttcaagacagggtttctctgtggctttggaggatgtcctggaactagctcttgtacagcaggctggtcttgaactcacagagatccacctgcctctgcctcctgagtgctgggtttaaaggcgtgtgctaccaacacccagcataactagtaattttaattatgtgcaaagggtgcatgtaaatttatttactttgaaattatacatgcaaaatttgcttactgaaaaattgtgaaaaggaaggcaaagaccacctgtggatttctaacattaggtttgcctggttttaggatggcgatggttttactaaatggctaatgcctatccatctatttttaggcagtctgaataatgattattcagctgtattgaatgagtacaatgctttataaatctaccactgctcaacttaattgccataaaaaattaggaaacaaaactgaaatacggtttatatcaatgaggttgagtttgtttttttgttttggtgtgtggatgtgtgtggttggtaatggtagtggtgttttctaattttttgagttagggtctcatatagcctaggctggcttagaacttgctatgtaaccaaagatgactgaactctcctgagcctcttgcctctacctcccaattaagatgatagacttccactaccatgctcagttttcttggtttcttttttaccacagatttagaagataataggaaatgtgctaatttcttgaactacaactttatgcattgctattttggataaaacaaatttcccattatgaaaattgtgtgaagaagggcaggaggtatagtgaaatgaggtatgctcagctgcatgaggccctgggtttattccccagcactataagcaggtgaggaaagggagaagaagtgactgatttctttgaaaataattgggaaagtagaatgaatggaaaggagtataaatgatgaaagactggcaatttttgatcttagttaaaagtttttgtcggtgcactagggtcatttttgtattctcattttgcatgcaccaaaatgtttccaaagtaaaatttcttttaagtaaaaatcaacttaataaagaatatttttatatctttaaaattttgcattttagcaagtgtgtatgttttcattctgttacatatataaatataaagcaaattagcaccatttgctcctttggggagtcttgccttactctaactaaaaaatgtatgtacaatacttagttcctgatatgcttcctttgtgccaggcacttgtaagtctgtcctgtttaatcacttataactatcctaagaagcaggatgttatatccaccctacttagaaaacaaactgatcttagcgttatattagtgaaagtcacattgctatcgagtggcaaagactcaaacttcttatctaatcccagaaagagccttagctcttagataaatttgattactgcttgcattaccctcctcaaagtaacaacaggatctttatcatttatcagtagcttgactgtgtggggtagttataaatgtgatagtaagcaaggtgaggcctttgttacagaaatcccatcctttatgtccctgggcatggtactcctcttttatctacactgcttcttctcaacagtcttcctgttttcaatgcagtgctatagaaagactgctcatgcctttcagtgttctggaccttccctcttctcaacctttccacgttatctcctttctgttctggcctccttagtattgggaaatgacttctttaactgaaacattgagtgagtgagatgggagaagctagaaggaggcagagaaaaagatgatcgatttcaagggtcaaaaaaaaacgccagtaaatcaaagcccatgtagtcaaaaaatgacataagttaataaaatcattacagattattacagttctttctttgttgttttgtttttcgagatagggtttctctgtgtaacagccctggctgtcctgaaacttgctctgtagaccagcctggccttgaacccactgagattcacctgtctctgcctctgcctcccaagagctggaattaaaggcctacatcaccatgctctgctcagttctgtcagttgtttacttgggggtttgaatggaaaggttatcaggctaagaatactatttgtaaaaattttaaggcctctttgaatccatttgcatttatgcttaaagaagtttataatttgtaaaaggaagctcttgctttctcacatgtcggaaactagaatgtagaactctccctccttgtagcagcagagtccaaactggtggcaagaatcttggcatcactagcttttagaaagtatcttctgctgtttgacagagtattgttaaaaggaatgcaggcaaaactgtaaccaaaagtggcagcatgcttccaagagggtctcaaggaaaagtattgcctgcagaagtgatagctatgggataagaatccataggatagcctggtactggtagcacatgcctttaatgccagcagaggcaggaggatctctgtgagttagaggcaaaaacaggagatgtggaaggattcagccaattatcgttagagttgacacacagttgttctcccagattatggaagcactacaacacttaaaaacaacagggattgtctctgttattaaaggtggtgccattcttataaagaatgtggactgaaatattgttaaggtggtattctgtgaacctgcctgttccactgacattctgagctacttcatccataaaaaactgccacacctcctttataagtaactgatgacatccaaactaaaataataaataaaacactttttgttactcatagacctctgctgtgaatacgtgctacatacatataatttcaaagatttagtatgaaaaatataaaatattcactgataacattttatattgtttgaatatattgtattaaataaaatacaccattgtatatttacctattttctttttatgttttaaaaaagtgactgttgttggcccgtggtggcgcatgcctttaatcccagaacttgggaggcagaggcaggcggctttctgagttcaagaccagcctggttggtctataagagctttttctaggacagtctccaaagccacagagaaaccctgcctcacaaacaaacaaacaaacaaaaatgtgactgttgaattgcctgtttcttgtactctttctctcttgattagacacttatctagaccatttaactagttaacttttagctagttaatgcttcccttttaaggtaagtctgactatgaatgacctaaagtagctaatagaagtaaataaaccttagggtggtctcagagttggcaaaagttatatagaacactaaatactccctttttataaaataatatttacatttgtgtgcctgcactggaggctattaaaattttttgtgttttacaggaagactatgataaatatggaatccgaattagagtaaaatttcgcagtagtactcaactgcatgaattaactcctcatcatcaaagtggaggtgaaagaagtgtttctaccatgctgtacttgatggcccttcaggagctcaatagatgtccattcagagtagtggatgaaatcaatcaggtactgcactgtgactctttgggggagcatactgcgtcctctaaaagatacagatacaatgaatattgtcattacgattttagggtatggatccaatcaatgaacgaagagtgtttgagatggttgtgaatactgcctgtaaagagaacacttcccagtacttcttcatcacaccaaaggtaagtaaactcactgaagtcatctgctcacatgtcccctttggcttaattgtggagcagatttgggctgagatgtgaatgtgagcaggaatactccctaaaaggagataaaaagattaaagcaatctacattcatagaagggacaagtttcagtgacatacttaatgagaggcttcatctgaagaagtgggagaggaggcacttcattatgttctagaacctagatctccttgcttttgatactcattcccattctagaaaacttcctctaagctgctgagagatgactgggaatgcaaaccccaaaactctagctctctctgtcaatgtcacatattgcccctatctttattcccactgctaccctaaccctaaagagtcttaagtacccaaacccaaggtcttgtactgacagatttttataacaacatagttatattcaatagagagttttccataatctagaactgttgcaatgggaaatacccttttgttaaatctagtgctgtgggtaagttctcaagtaaatgttctcaaagatgtatttattactaattacttttttcaagtaaatattcatatatatttcattagagagcccatcaaaatgtactttttgtacttaatcatcttttatatcagttctgtggactagtcagatctgccccaattctgtttcttaccaaactccttgtcttagcgaccaaacctccctcacacatttcacacacaacagtctatcacagtacttagccatagaagttgttgaagtgttttgtgtagaagtgaaagtgcacactcttttccaaggtgtacctatggtccttgttgatttgtgaatacagaggatttccaggcaactggaatattccaggtcagttattaggccaggctttaattatgcttattcaggaagttgtcatagtttggcaagttgatgtatttgaacatatgtaaggctggaaaactgtctttctgagtatacaatttaattatgtggcaatttgtttcaatccttcagcttctacaaaatcttccttattctgaaaaaatgacagtgttatttgtctacaatggtcctcatatgttggagccaaaccgatggaatttaaaggcttttcagaggcggcggcgaaggattaccttcactcaaccttctcagtgaaagaaaagggaggggacttcagaggttttcttttaactgtttatacgtgtggctcaagtgaataaaagttagcagatttattgaaagagaaagattggttatttttgaaaacctgcttttaaaaacaaataggttgatgaaatggagactgcagtgactctagaacattttctagtgacaattaagtcttcggtttggttgaacttgactccttagtcctctgtgagcactggatggtgtgtaaagatgtgtactgccccacagtgtagtggctcccgaatccagcacttgagaaggagaggcaggagatcatgagtatgaggctagtctggactgcaaagcctgatccaaactgtgtaggctgcacgtagagtgggatcatgtgtcataacaaaaaggtatttcctgttggaaatcaaaggtatggaaaaatgcggattgcattcacaaagcatttactaagtgcagtagctctgagtattgattgcaggagaactttctgactttcaaaccttaaaggcaactcagaattagaaaaatcccactttcttccagtattatattttttaaaaactgatatgggaatgtctatttcatggatactggtttgtggcagttctgttcatttctttgtgttaaagattaccttattttcatggaaagcatgtttatgggcctttaacacttctacaaaacttgatgctacaattttattggtatttcaaagaattgggaaaacatatacacaaggggctttaaaatggcagcaggattataagaggtcacaaggtaaagatgacagatacagcccaaacattaacagaatgaaatgaggtgttaaaaactcaaagaacaagttttgtggtggtgttccttgttctgttttgggcttttgtttgttgcttttttttttttttaatttaaaatcaaatgtattttacatcttaaatttctaaaagcatttttataatttaataagctttttcttaagatttcatatacgagtttttacaatttgtatttgaaatttctcagtgctatgtaaagagtaatagcaaagtattgattatttaaaatcatgtttacaagattaatcagaccctatattttagaaaaatctcatctaaattctcccagcttaaaaaaaaataaaatgagaaaaccaattatttttcattgaggatgctaattaacagtgccaaactaagtcttgcaagaaaatagaaatgtctttgaatagtagactggcccatatctctgctggtactgacaaaattattttttgacatgctagcctgaataaaccaaagttttggttttgtatactattgtaattgccaatgaagtttacattctactaggttaaaaaataatggaacatgagcctatgtcgtagcacttagacattttctcttttaaaagttgtgcttctttataaaacatgtaggagagccctccccttctaaactaagcctcatacatgtagtacaatgatatttttaataacatttttaccagcatgaacaagtcaaaatattttaaaacttggtaacatattagtgaagaatattttctaaatgttgtattgctgcttggttttctgatatagtatcttcactaatatgtgcttgatgtagtttggttttatcatgtcagtgtaaaaactgactcaaggttaaaaactgaaaaaaaaaagattgaagattaatcatacttaaaactcacatcagcaattccattttcagtttacatatgccaaaacttattccatatcatatttataagcattcagtgagcaaaattaatgttctgttttatattgaactttgggctggaaggataaattgtgtcatttatcatatttaaaatagtcaaacatagtataatgtcatattttctgaaactgttgattttttaattacatgtaaaaattccaagtaaaagcttgatttgataaataaaatacttaaaacctgaaggttacagatatttttgatgactaaatccttatattgatttgccaaaggacagtctctgttaaaaggtctctcatttaaaaaaaaaaaagaggggggactggtgttttagttttgatttatttgtcttggtatgttttgggtgtttgtttttgtaagatttatttttatgtgaatggtgattttgtctgcaggatgtctgtacagtacatgagtgccttgtgcttgctaaggccagaagagggcatcagatctctgggagtggagaaaaaaaagttgtgagctattatgtgggtgttgggaatagaaactgggtcctctggaagactggctggttgtcttaactatgtctctccagagagatttcttgctaccttccaatagctgtggacataagcctgtagcctgtgaggggtatcttttcatcctggtttgtgtaaatgtaagtgattaaaactatgttgtatatactactttgttggtaataaatacatatttttccatattttggtataggttatttaaaatgagagatttttaagtactttaaattttcttaaaagtcatttttgttttcaggattacaaaaaaacttttcagtgtctgttcaagtgtctgccatttaagatgcagtgtttaatagtctatttgtgttccaaaagataaaaatttagacttctgtccatttgcagtggaattagaatccaatagcagtaaatacggcaaaggcttgaaaacatgaaagaagccaagctagaagccaaggataactgtgttgagacagtaacttttctaaaaacatgctcaatcgtcattgttaccttaggatttcgtacattgaaccttttatttttttttttaagattttatttattatgtatacaacattctgcttccgtgaatatctgcacaccagaagagggcaccagatctcataatggatggttatgagccaccgtgtggttgctgggaattgaacttaagacctctggaagagcagtcagtgctcttaacctctgagacatctctccagccccccccctttttttaaagattttatttatttcattgaaccttttaaaatgtatcttgaatcaaattctttaccacttacattcagctatttccatgctagcaatatgaggacatagctaattcatagttttagatgagagtcatgtctgtgagtgaaccctagcatcattgttggcactataaatctttccttctgctgcgtatgaagtattttgtctgaattgaaggcaggattagcatagagacttttccatgttagtgataatattagttgttcacaggatccagatagtgatggaccttgtgtaacagatacaagtatttcgtatgccatattactttgatgaaatctgaatgtgagtaaggtgactgaacctatttataatagtttgtcgtattactttatagccagccatatattttaggatagcacattactaatagagtgtatatacttgggagatttgactgttgacagtttgaacttttttgttttctcttatttttgtttgtttttttgtttttcgagactgggtttctctgtgtaatttagcctgtcctgaaacttactctgtagaccatggtggcttggaactcagagatccacctgtctctgcttactaagtgctgggataaaaggtgtgggccaccactgcccagcaacaattgaactttttattcccagtgcaacaattgaaggtgtggaattttatttttttcatttttctcctccttttattgtacaaatgtacataatgtaaattttactattttaaaatatataattcagtggcatgaaatacatctacaatgttgcacaatgatcattcttatttattacccattcgctataatcctagcatgtcaccttgtatctattcagacagatttaacatttccctctttaccccagccctggaaaattcttctcatttgtctgatttttcatggtagcattaaaaaccagaataactggtttcattatgatattttcatacatatgtgtcctgtgctgtgttcctattcattcccctcccatggcttcatccccccacaccccacttccctcttcctcgaaatagtgcccctttgctttcaagtcgtatatgttttccttaccatcttttcccctgcctcctttcagagctcatgttctccttcctagtttcatgagctacatacatgtatatgtccacacactaacatgtcagcaggagaggaaatgtaaatgtaaatgggagttcttttttcttttttttttttttttttccttttttttagaggaagtcaaggtttatttcttggaacaggattgatacactggacatacagcacatttgatacaaatcaactgaaaacagtagcagtgggactgagaaggcttagtggttaacagcacttgctgcgtttacacaggacaaaggttcaattccatgcagccacagggccagatacagaggatctgacaccatcttctggccctggcacttcgtgcatgtcatgtggtacccagacatacatgcaggcaaaacactcatacatataaactttaaaaatagcattgttatgactggaaaatacatgcacatgattgaagtaacctttggctgagtgaatctgtagacatggaagatagggtgagtaatcctttgattcccaacttccatttcttcgtgttcttcttactcttctatgcttactgtgatgtgctccccctccaactaataacctttttgagtttattttctctttctttgatttgaactcttgtttctaggtcagagacttgacagttcatgaaatcttagtgacctgtaaatttttgttctcatgattttaaaactatacctgtgtctatagagagtgttctgacagatggtatagttgagagcctcttttattatttatttattcgtaaatggagttcttaattggtccaaataataaaaacccggagtcagatatagaggaaaatgctgagagatcagagagaagaaggaacaagccaaagccacctttaatttattcccagtggaaaagagattgagttcctgtttctgcccatgtatatcctctctctgcccccagccatctcacttcctgtctgtctttacagacctccagacctctatggttagctagtggcaagctccatcttctgatcttcaaacaagctttatttgtacaagcaagatatcaccacatctttctacttactttgcttagtgggtgggttacaaaagcccaggctaggcctaatgtctatgtccttgtctgtcttgtctatctccttccccttcctacctgcctcttttcctggatcaggatgtaaagatctcagctactattgtagcagattgcctgtctacttcctgccttgcaaaaagtgcttttatttactaagccttttctatagcccctgttgggtgttttttgtttgttttttttagctcagactgccctggaatttgctgtgtagaccaggttagtcttcaaatcacagataagcctgcctctcctcccaagtgcagaaactaaaggtacacggtaccataacctgttcttgatgaatttgttccctttattaaaatctggtgaccttcttgacctcttccaattagggtctgaagtctacttttatccgaatggctatgccaatttgtattgggcttccattttgtatgataggttgactttgatcatttgattttcagtctttgtatatctttgccagtgagttgtaatacttggacacagtagataattgatactttagtttttatattttgtttttaatgtttgtttatacttatgatcatgaatgtatgcctgtgtgagtttatgtgcaccagtgtatgcacaggcccacagaagccagaaggcattggatgcccaggagctgggggttgtaagctgccatgtttgggtgctggcaaccaaacctgggtcctttgccagaacactgtctgctcttaacatctgatccaccttgctaaccgggtagtagatcttttaattcattaagctaatttaagtcttttttaatgctgagttgaggttaatacttaaagggatttggtaatttctgtggtcttttggttgttttctctttgtattgttgcttgttcttttctactctttctaggagtttgtgttgaacatgagcgattccttctcatttctttttttgtctttttatctcacaaaatgtatacattcttatggtcttgcgattgaaactgtctttgcgcctgccctgtgctggcttccttttcattagctgtctaagttgtgtctgttttgaaatatctttatttctctgtcaattttaaatgatatctttgctaggtgtaacagttgtcttggttctttttaactttcagaacttgaaatatatccttccatggcttcttgacttttagaattgttgattacactggtggtgttctgatgtttgtcttaacaggtgcattggaattttccccttgcaacttttggcttgggggggcattatttttattttttaaatattttatgcccgtatatacacacacacatatgcatgcatgtttgtgtgtcagaagtgcatgtgttcaggagttcatttatgtgtttgaagagtgtacatatatgtacatgcatgtctacgagaggctagagttcaacctcagatgttccttgggactcatccaccttgtttttttttttttttttgcatatcttactagagcctagaactcattgattagactagacctactggctagccaggcccaggagtctgcttatctcttcctctacctggaatataagtacactcttccatacctggctttttacacaggtgctcgagattgaactcaggtccttctgattgtgtggtaaacatttaacctactgagctatccccagccctcatgtgcagttctgacatcttgacctctatgtcagagactttcatctctggtcatgtgtatttggagttaatctttgttacttttctattattctgacaaaacaccataaccaaggctgcttataaaagaacgcatctaattgggcttatgatttcaaaggattagagtccattatggtaaagcaaaagcatggtggcaagaacatctgaaagctcatatctatatgcaagcaagagacagaaagcacactaggaatggctcaagtcttgaaacctcaaaatttacctccccccccccagtggcctatctccttcaccaagaccatacctcctaatctttcccaaacagttccaccaattgtgaaccaagtattcaaatatatgggactatggagtcccatctcattggccatcccttggcccccataggcccgtggccatatcttaatgtaaaatgcatccagtccaacttcaaaattacttgtgatgtttttacagtctctacactgtttaaaaaagatcttttgggacttaaggctatatcttaactgtattcccctgtaaaatcaaaaagcaaatcacatacttctagcatataatgatacagaatatagcttgttatgccaaaaggaaagaataaggatatagtgaggaaatactggaccaaaacaagatctaaatgcagcagggcgttctctaaatcctataactcgtgtctgatgccaaagggcttagatgcctcctcccttccagcttcactgactgcagcacatttctctctcctaggctggttccactccctttgttccacctataatatcttggggtctccagagcaatccaggcttcacttaggcagcttcacaaaatggtctcttagagcctctatgcagggacaccaccacccccatacacacacaagttccgatggcctcccattctgcttaacctcagaaagattccaagattcctttacttgtgtatcattcttgaccaaagccagaactacatggacaacactgccacattcagctgcctgcttggggtgaagcctggtccccttggccatatttgtagcagttttcacaaatttaaagcttagctggttgaaatattgcctccctttattccagtgcagatcaggcctctccttatctcttacagcacacgtggcaacgataattttctggcgctttttctcttcaaactgtattttgtttccctttatgctacacatgctctttttcattgtagacttgtataagagcaattactaataaccacatcatagagtcaatattaagctgtcttgaaatctcctctgtcaaagaaattagtctgttactttccaatttagcctcaggcaaattattaagacaggggcagaaaacagccataatctgcaaacatgaaaaataaaaacctgctgggcgttggtggcgcacgcctttaatcccagcactcgggaggcagaggcagaggatctctgtgagttcgagaccagcctggtctacaagagctagttccaggacagtatccaaagccacagagaaaccctgtctcaaaaaaaaaaaacaaaaaaaataaaaaataaaaaaataaaaacccagaggcagatattggaattcaagctaaataccagagaatcaaagcagccaagccagtagatcttacctctactaaactgaagtgataatcctgtctccacaaatcctcaggggcaaaagctctcagttcttgtctcctcctgccttatattcctttctccacccagccatatcacacctgtctctgcctccctagtcctgggattaaaggcatgagctctgttactcttcactcttgtgtaggccagggtggccttgaactcacagagatccatctgcctgatctctgtgtctggtggctggctttgctttctgaatcctcaggctagctttaataaatcataaataatatatcaccataatgtccattgccaaaacattacagaaatagtctctagttcagttgctaatagttttctcatctgaaacctcttgagttgagcctccacaatctacacagctcatagcactactgtcttccaagctcctgctaggatggctattgagctttgcttataacattcggcagcttccaaaatccagagtcttccactttcctccaaaacaaaacaaaaaacaaacagacaaaacacttaggtctgctgcaacgatagcccaaattccctgatttggttgctgtgacagaacaccatgaccaagacaactgattaaagcattgattggacttagggttccaggaagttagcatacatgatggcagagcaaagacacagggacaggaacagctgagaatttgcacctgcattccaggagcgggagacagaaagcacacaccctgggaatggcacaggtaggtctttcgaaacctcaaagcccagcccacccctagtgatacctctttttcaataccacacctcctaaaacttcccaaacagttctcccaactagggaccaagtgttcaatctttttatcagcctttgggggttctttcttattcaaatcaccacagggttcttaaatgcttcttgtgtatagatgtctagtttttttccctctagatttgaaatattttgtactagttctcattttttgttatatggatatcaatgtgtgtgtgtgcctgtgtgcagatgtgcaaaggccggagggttaacctcagttgccatcttcatgtgcccttcacgtaccctgttttggagacagggtctctcagatctggtaaattcaagcttctcttactcaaagaggagaataagtgtttgggttacaatcagtactatcagtacatccccaagaaataacctcaccctatggcttactgagagggccctcgcattaaaaaaaaggcttggtagatagccctttttgctcttaaaaattggttatctcaggctggagagatggctcaggggtttagagcactgactgctcttccagaggtcctgagttcaattcccagcaaccacatggtggttcacaaccatcgttatgagatctggtgccctcttctggtgtgcagatatacatggaagcagaatgctgtatagaatgctgtatacataataaataaataaaatcttttaaaaaaaacaaacaaaaacaaaaaaaatggttatctcagccgggcattggtggcgctcacctttaatcccagcactcgggaggcagaggcaggcggatctctgtgagttcaaggccagcctagtctccagagtaagtgccagaataggctccaaagctacacagagaaaccctgtttcgaaaaaaacaaaacaaacaaacaaaaaattggttatctcagtctttaaggttacttacttgtttgtggtttggttggttgtcttggtttgttttgttttttgtcttttctagtagagtatgaaagtttttgaggaaaatgacttcaatgtgttggttgctacttccccagagcctaggaaaatacttactttgtagtaagcactcaattactgaagcataaagggccattatttctagctgggtgtagttttgcctgcctgtcataccatcccttcaaggacagatcactgccataaatctgagaccatattgagctacatagtgggttctcaaccagccatagttttatagcaagactacatctcaaaagaaaaatgctctctcaatactgatgattttaatgtgggtcacttaattcttttgtgtacagtgagcagtgctttgaactctctagtttgaggaataaaaagttgtgtatgcctgtggttccttcttaagccatctagtgagttctgtacagcctaatatgtgacctatcataatttgtacactgctggatcagacagcgcctgagggctatggggatctacaagccttcctagagttacagagcttaagtacttacagtgagcctttggaaaagaagaaatagaacttgtaggatggtagacaaagtgtgttataggaagttaaaaggtgttggttaacaatagatatcaaactgatcaaagactttgtacacttttattatgaaaaatagaatagacagtctttgaatacatacctctttttgttttgtttttttggaacagggttactctgtgtagccttgatgtcctggaacttgctgtgtagaccaggttggccttaaattcacagagatttgcctgtccctacctcctaagtgctaggagcaaaggtgtgtgccaccaccacctggctttaatacatatcttgaatatcttatttctcagtgaaaacccatttctcatattcatcatgtttattatgagccattagtttactttaaaaaaaaacaaagcaaatacactggcctttgtgctaacaatgctaatgttaatgaatggatagtagcacctgtgacagctgccgtagtctttactttgtgattagagcacttaggtatgagttatcagaaccaactgactatccttgtaatttaccctagcatgtaattcctgcttatgctagaggatttaaagagaatagcaaatataacaatggctaaaggcattagtaaaaatcatttaagaaggtaaagtaggttagtggagctcaatagttagttcaggatacaagactggagagatagctccagggtgtgtgtgtatatatatattgtttgttttttaagacagtgttttttctgtgtaataaccctagctttccaggaacttgctttgtagaccctgctggccttaaactcacagaggtccacctgctgagtgctgggattaaagacatgcactatcactgactggcttaaatacatatttttcggatctgggataaggttcagaatttcatttttgctttggatgggtgggagttgagatgccctcatacagcccaggctggcctcacactttagtatgcagccaaggcagccttgaattctaatcttcctatatctcccaaatactgggagattggattcaggaagatcatttgactgggctgattggatggtgggcaaagtatatgagaaaggcaatgaaaagaggagaataaataataacaccaagatgcttgctgtatcaagaacagaagtggtggaaaaagtctaagagttatttgtttataaaataatcagctttgtttattaatatcatttccttaatagtattttagcatctcatttcattttcatagaggttcagaagtgggtattttcaaggaggaagaaggcttggaaagatcataatgacttttgcaaagttgaaactggtaaatgttggtattgagattcagagacaggtggtgtccaggaaagagtacagacaatgaccgcaatactttgtgtccaaaaaaaaaagtggaggggagcaggacagtagtgccacctgcctttgggaagcagaggcaggtggatcactgaattcaaggccagcctcttctacagagtgagttccaggacaggctccaaagttacacagaaaaaccctgtcttgaaaaatccaaaaaaaaaaaaaaaaaaaaaaaaaaggaaggggaaaaaatccatcttataaaaccaacactgtatgacataatttctgtaaaactttgtaattctgcctgattttttcaaaaggctcttttggctataaagcattttaaacttattacagaattaataatcccttgtgaagtacacacagtgacttattcatgaaggataaaggaagtacctacatatgtacatattgttcaataagtttaccataattccctgctcaagtatggtaatcctctcttacaaatacatccttcctttattaatatattcccactctgagggggggaagggagcaatatttactaatttaaatgctagagccctgactttgtgctaaaacaatataggttatctttcataagcaattccctagtaccatttatttattgctagatacattattatgtgacagtacatcatccattgatttctagtactgtcagaagattcttactatgcttcattgattatgaggacaaatgcagggtttacccagattatacagaaaaatatgcgccataactcattttctgatcatgttaagtttatcattgaaaattttatagcataaatgtaaaaccaagtattatgtaacaatgccttcacataagctttaagccataatcactttcctccacagccctgccttccatatatgtccaggaaaagaaaggtattagagtccctgtttacacaagaagtatctatgtgtctcattaacatgattaaagaccagcctaaaatgtcatgttgttgctacctgaactggagacaaaactgaacaccagtgtaagggacccactggcataatgctataaaaggttcagaaggtaccaggccacccctggagaactgtaaaggcagagcttgtgaagaggggaaagagttgaatcatgggacctagagcaaggtatctgcttgtaaagctatccggattgatctagacctttcatacccaaaatattataaacagaggaaaaatctttgaaaatgtttaagtgtactaaatatgcacagaatttttttttatcattctctaagtaatataacaactctataattgtttttctgtcctgcctggtccccctgggtcacctctagcccactgctccctgcaactgtttatcaaatggtcattctgaggcttaaaattaattacaattgtttggccaatggctcaggtatattactgactagctctcacaattaaattaacccatatttactaatctgtgtatcaccacatggctatggcttaccataatgttctagcatcttacctctacagtggctccatggtgtctccttgactgtgccttcattctctccataactgtttggatttcccacctacctatattctgccattggtcaaaacagcttcatttatcgaccaataaaagcaacacattagcagcatacaaaaggacatcccatatcactttggacattctgtttgcattgtattagctattataggtaatgtaaagatgatttaaagtatatgggtggaagtgcagtggttacaggcaaatgttacactatttcatatgagagacttcagtggccctatttttgttatttattggggggacctcagagaccccgaggaacaaatgtattttactttgggctttttttttttttttttttttttagaggtagatgtgatagttaacattgattgttaacctcacagtatctagattcatctagaagacaaacttgggcacacctgtgagaggttatctagactgagttaattgaggtgggaagactgactttaattacaggtagcaccattccatgagctggagtctgggttgtttggttgattggttgattggtttgatttttgcagcagatctcttctatatgtagtgctggttgtactgctctggagctcactgtgtagaccaggctgacctctatctaactcacagagatcctcctacctcttcttccagaagactgggattaaagacacaaccaccacgcccagcttggagtcttaaactaaagaaagaaagcagtaccaaccattgttcttcccaattgaagatgcagcatgaccagctgcctcctgcccctgctaccatgccttctccaccgtaatcaaatgtatgcccatgaactctatgccaaataaacccttccttatatttttgtcaggatatattatcacagccataagagtaattaattcaggaggacaagtttatatgtggctcttagtttaacaggaatatagtaccatcatgggggaaaggcaccgtgtaccatccatgataggagaatattacagtgcaacttgttacagctcatcacattatgaaacacagaaagcctgggctgtaagcaaggctggctataactctcaagacctaccatctggcaatctcttcctctaacaaggccctacccctccccaccacacacacatttctacaacctcccaaaatagctctaccagctggctaccaaagtgttcaaacatatgagcctgtgtaggacatttcacatccaaaccataaagtccacagtctcttctgagactcaaggaaacatcttaactgtgagcccttataaaataaaagcaaactaacttatataatagcaaagtgaacattttttaaattaaggcttgctttgcagcctgtataatgcaatcaattttagagaaagtctcacacaccgctgagaagaatttgtattccctatctattgagtagaaaggctctgtagatatctgttacagttgggagccaggcagtggcggcacacgcctttaatcccagaatttgggaggcaggtggatctctgagtttgaggccagcatggtctacagagtgagttccagaacatctagagttacacggagaaaccaaccctgtcttgaaaaaagaaatgttcagttggtctggatttatttagctctgagatttctttactggtttttaatttagaatacctatttagatgggagagtggagtattgaaatctcccattaccactatatggtctttagtgaccttttagcatttgttttatgaaattgggggccccagaattcattgcatacatatttatattagttttaccctcttgatgaattgtccccatgaacaatgtgtggtggcttttgtatctcttctgacttatttttatttgaaacttactttattgccacaacttacttgaagctcctgcccagtagtttggtgtcccacctttgcctctcaacctgttttgttttgttttgttttgtttttatatttcaagacggggtttctttgtgtagctttggaacctgtcctggcacttgctctgtagaccaggctggccttgaattcacagagatctgcctgcctctgcctccagagtactggaattaaaggcatgcgccaccaccacccagctgcctctaggtttttagaagtctttcataaatagagacaaaaaatagttgggttgtggttttaatccagtcagttgatcaatgtcttttaattagttatagccatttacattcaaggttacaattgagaaaggtttgctatttctgattttgttgcttgcttttctggtaggttggttggtagttcttttctccctctcttggtagtgctgggtgtttgttggtttgctgtgttggatgtaattgattccttccctggtctcattgttaacatctcttcatggactacattctgtcttgctttcttgtgtgttaaagtatcctcttatatgtttcattccttcaagaaatgctttggggaccagagagatgacccagtggtaaagaacatttactacacttgcagaggaccaacagtgctgttctcggaactcacatagcagtttactgtcacctgtcactgcagtcccagggaatccaaaggcttcttctgaccatctgaccttctccagtttatgtatataaatggtgctattcatatatagattcaggcacacgcatgcacacacacacacactaaaattaatttaaaatttttttctgcagtgctggcttagttgccttaacttgtgtttatcttgaaggtttttttttccattttaatagataaatttactgggtatggcaatcttgattaatactttcaaaccttgggctttattattccttgcttttctagcttttagggttgctgacaatagatctgttcttattctgctgttcctgtttttgtatgttagttggtatttcccttgcaatttttgttattgtttctttgctttgtatttttgacatcttgactacatgtcacagagaagttcttctgtgatcatgtctctttgggaatctaaatgtttcctgtgtttgaatgcctgttcttttctctaggtttaggaaattcttggctataatttcactaaaaacacttggcttttatatcaactcttccttctaccccatgagtcttaggtttggtctcttcagtgtatccaagattttttggaaatttgatcgtgcatattgatatacacatttccttaaagaatttttcctccataattttattttgcctcaagtgctgattctttcattcactttgagaactttgtgtcttgagttgatttcttaagttctttttccatgtcttaagttaaattccttacctgtgtttgaatcctctgcttggtccccgaacctttttaaaaatgaagtctgcaatcttttcccagagatttacctggttcatcgtctctgagaggccaccgtctatgggctgtcctgataatggatcctgtttccaatgttgaggagctcaaataagagcagaggcagacagtttgtcctgcctgaagagtattctgggaacttagcagaattgtcgtcatcaaagagacccaagagactttatccagctactaatgggagcagatgcagagtctcatagcaaatattaggcagagctcagggagtccttcggaggacatggaggaaggatcagaagaaccagataggtcagggacaccatgagaacactggcccacagaatcaaatgactgtgactcatggagcatcacaaacaccaggaagcctgttggggtctgatctaggctctttgcctaaatgttatgactgagtagcttggtcttcttgtgggattcctaatggtgggaaacggggactgtctctaactcttacctacttgtgggacccttttcctttctactggattaccttgtccagcctcgatgtaatggtatgtgggtatgtgcctggtcttattgtaggttgttataccgtgtttggttgatgtccctgggaggcctgttcttgtatgaggggaagccgggggtgggggtagggatctgggagagaggaaataatgggggttttggggagggaagggagaggaattgcagttggggtgtaataaatgagaaaagaattagaatcatggaagatctctgcttactggcttcctctccatgggtggctcagcttgcttgcttatacaactcaggaccacctgccaaaaggtggcaccatccacaatgggctgagcccttccacgtcaatcattgatcaaataaatgcctccatagctttgcctatgagccatctgatagagtatattctctgctgaggttccttccccctccccagatgattctagtttgtatcaagttaacaaaagacttaagcaactgagggtgcatgtgtcctggttttttaagttttcttccctcttactctgtttctgtttgttttatgtaggtgtttctggtggcttttcactacaatttatgctcagggttaggcaaggttgactgcagtagctgccatgatggtttgacagaaggaagtgtcagagtctgctgcaaggaaactgctctttacttgtctcctgtaaggtctgaaacacaagtgctgggccctggttggggaaagtgtctattttaagtaatgataaaagtgggtcaagtaggagtgtggggagcatatgagataggggtatgaaaagcaatagagaaaatactgtatattaaatctcaagaaagtggcggatacaatagcttttcccagcaaacaaaatacaacgtataacttagcttttatatctgaaaatacggaaatgtacatattaagaaaaaaattaacttcaaaaataacaaaaattaaacaagattgcatgagcaataaactgaaatttatcttttcaaaagattgaaacaggtgtgttctcagtcagcatttcctcctggttgcaggagagctggctccccaggtttatttcagctttctgtctggacactgcagcaagttccatcccaaactcgctgagttgagttttgccccttcctgctgtggctaggcagaattccttactccacttccacagtcaccacattctgtgtatcttggagcctgtagtttccatgtagatgcaattccccaaactgctcacatacttcctgtggttccaaaagctttcctgttccatgtgtatgcaagtttctcaactttagggtccattactcattctcaggctgtgttggaggattgcagacttcttcactgagtaccagccaactgaggatagcctctgcagtgttgagatctcgtgtttgttcctggcatattcagacctcttctctggagattgtgtttgtctctgtttctccaaggaggtgggtgcacagctaaggagtgacgaggtagttgtagagttagggtgctgtttctctgctaggctggtgttggaataccaatttgaaccccagtatgcttgaccagccttgcctgcgtgctgttgtctgtggtcaaagactgcagggtagctgggatggccctgtcaggggggtctctacaaagctctttttagttttgatgccctcccccagtcactctgtcatcagagaacactggtcagtcatatgttgagtcctacttcacataatattttgcttctaatagcttttactccttttctcattgtatgtaagatttccctttttattacatgtgatcttccttaataatgcatagactattctgctttgtcctttttgtgttatttctaatacggtcttcacttctgtaaactcttttctttcgcttaaatttgacctgtttttggttggttgcttgggtgggtgggtggatggatggtttggattttttcattgttatcatctcctttgttttcattctatcttttactttatagttaagtattttatacttgaaatgtttctgcagtaattttttctttcaaaatactccgttctgctgatacttgttttctttcctgatttgggatttgtttgtttctttgttttggtaggggagagttgtttttgtttggggtagattttttttctatttattgacttgaacttttttctctattatgtattttgatcatattatttcctctcccccaactccattcagatccttcctactacccaacttcatgttccttctctctctcaaaatataaaaacaagggctggagggatggctcaaaggttaagagcactgactgctcttccagaggtgctgagttcaattcctagtaaccatatggtggcccacaaccaactgtaatgagattttgtgccctcttctggcaggcaggcatacatgcagacagaacactgtacatagtaaataagtctttttaaaaaatacaaaaataacagaacaagagcatgccaaaaatggaggttttgtattggccagctacggagcatggtacctgccttggagtatggatgatacacccagtgtcattggaaaaaaaactgattagcaggtatgaattgtacatagcttttggttagggatgggagtttgtgcccacttcccctctctgctaggatttgtctggcttgaatttgtgcaggttttgtgagtgctgtcccagtctctgtgttcctgttgtgtctggaatgtgtcatttccttgaagttttctactatctctggctcatacagtctttccaactcttcttctttatatatctctgagccttgaagggaggggcttgataaagacatcccattaaagactcagtactccaaaacctctcactctgcacattgtgcagttgtgggcctctgtgttaattcccatctgctgctagaagaagcttctctgacaagggttgaggaatgctctgatctatgggtgtagcaatatgtcattaggagccttttttttaatgttcctttggcagaataatagtaattttgtccgtaagcccatgacctatctagtctcctgttcttgtcactttagcagtgttgggtataaatttcatctcatacaatatgcctaaaatccaattaggtagtggttaactattcccatagcgcttccgccactgttttccctttatgtcttgcaggcaggtctctggggagatcacagttttgtagctgggtgagactgatgattacttctctcctccagtagtgtgcagagtaccttccagcactatgcatgctagtcagtataagtgaaaaggctggtcaggcaccagctcaatacctccatatttgatggcataagtgatgtcttcagcaatcttcaccttattgtcaagttgcagagagccaccagtagcctgggcaatatgtgatacttgcaggagtagtgttctagtttctcctttatccctttgtaacactttattctgtttcccctcccttggtttctaattttgctttttactttgtaagtttagtagttaggttgtttgtttgtttgtttttatctgaaatgctttttaatttttttttctctcaaaacacccttttcttctaatacttggtagtttcttgactggcttgggttttgggggagagactgtgttatctgtttgtctttgcagttgtttgttgtattttttcatttcattctctttcgcttgttgctttgctcctatatattaccccctctacttaattcctatttgaatagagtgaggtggagtctggttaatacttgccctggacactgactttctcttcaccctgtttacccaggaatattgaaaacattgcctagaacttggtgcctaaagctgggatattggttgtacagaggtttacctggtttgctgcaggttggttagagagttggggttcttagtaagcagggccagctagtagtttcagcttaaattattttgatctctttcatccattttagcagccattttcagtgtagctatatcccgctattcccatagctttgtctttgtgactacaagaaggatttaataaggcccttctgtagtggcttgaggtctgcactctgagctggtagcaacaatagcaaatgctgccatcaggcatcatttttcagttccatctagaagacattgttcctaacatactcttcctatatctctgtgaggccataattagttcctagtttcagtatctccaggtttgctatattttattcactttattatagtgagtttcagggaaaatgaatacaaggagggcacttttctgggagctcccttatatacaaaatatatgtattttcatttattcattatttattgcaataatgggtagtgaactcagggcctaggtgagtgccctattactgaactatattgccaagctccactctttattttattttatttttgagatagggtctctagtaacccaggctggctttatgctactgtgtaggcatagaatgacttacacttttggtcttttttacatctgcctcccatgtgctggaattacaggtatgcaccaacatgctcagtttatctggtctgaggagttgaacccagtgcttcatgcatgctagacaggtactcagtataccaactgggctacatctcaggtctctgagctctccttttaaaaatggtctatttcaaaactgtgtctcgtttaagttgcccagaatgaccttgaactcacttgataacccagacaggtcttgagcttgtggttttcctgcctcagcctccttagtagttgtaattgtaggtctttgccacctggattgtctgtatattttaaacacatctgtaatcattccacataattcataacattgcttttcagtatttttgtataacatactaatctttctgacctttttcactcagttatggataactacatgtgccttgaagaattgttaaggactaaataacattgtacctctaaattacagtggccaccaagggcttgtttgtttatttgtttgttaatatttctttacttcaaaccaagacagtagagtggctttcactggtcaacatcactaatctataagcaagttggtatctgaacttgtctgaccattggtaccagttaaatattttgcagggtcccatgcaaagtaaaaacacagagagcctgctcaaggtgaatttcagggccaaaaggatagttcagctggtggaggcacttgcctcctagtctgtgacctaggttcatttcccaggattcacatggcaccgttgtcttctggattctacattgtgtttttcacacacacaaataaacatttttggtttggatttgctttttttgagacagggtttctctgtgtagccttggctattctgaaactaactctgtagaccaggctggcgccttatgtggtaccgtatttgtcagagtagaaagctagttcaaccttatgtggtactgtatttgttcgagtttggtgtaaagtattcagtgaggggagtcatagaagctgacatgtcacaaaggaaaggaagccaataaaaggatgaaggcttgctcacctgggctggaactgtgatacacaatccctgttttcattctgtgctggtctttcacattctggtctcagttcccaatgggtagcttttcagaagctaggagtctaaaaagaaagcattttagcaaacttgagacacatggaatatcaaatgttttccccactgaggtttgaattggctgctagatacataataaatatgtgtatagccaatgaataacacatgaaaatgacaaatagtcaataaaaaactgtaaaaagaggcactaagtgactttttttttttttgagactgggtttctttgtgtaatagctttggctgtcctggaattctgtagaccaggctggcttagaactcaagagatcaacctgcctctgcctcccaagtgctgggattaaaggtgtgcaccactgtcaggtgagtgactcttaagtggagctatttgtatagatactttctttgtatttattgtacatcttgccccttaaaaaagcaccatagcaggcagatttctgtgagttcaatgccagcatggtctacagagagagtcctaggacagccaaggctacaaaaagaaatcatgtctcagaaaaaaaaaaaaaaataccatagccacaaaaactgcttcctaaagttgcccatatgcaccaagggctcctgtttccacaactttctggttggaaagttattttgccagatctattcatttctcttcttcacaggttttagttataagagccatcttcatatttacatacactttccccaagcactttcccataaactgcgtattttctgatatagcatatatacagccattatttttctgtctactgcttttgtttactttttatctttacatctgcccattggttccattcttcagtctcctgcttgttggcttccatgtttctttgttcctaagatttcattatccttccactcttctctcatgcatccatcagtgagtagcagagaaaagcaaacttggggtagcatagtctgagattctaaagacctttattttcttgctattctggaccagtgcctatcctggaccaataatactgaatatgtatttctacttctataaaatgggtatattagagatatgtgccctatagagttgctggggggcattaagtgaaataatagacagtctacaaagagagaagctcccttcccaccttttttgtttttaccaaatagtctcaaaatcttcacatcaatctgttaatattgcattagctgaattaccaggcctcatcctcaccaaagcctgcatgtgtgtgcctgtgtgcatgtaatttaatcataaccactttgttagtcttgacactagtcctgttttacaaccataaagagggcttacagaagcagtttcacttactcaacatcactgtgtgtgtggcaggaacatttgaacccagctgctgtgtgcttggagcctgagcctagaggctggcctgcctccttggctttctgtatgacctccatatccttcttttcagtgtataacatcctattttttataagatacattgatcttatcactctaaatgcttttctaagcaaaatgtgtatgaatagaagttggatattgatattaaaagcctgttatgagcaagcaatttcctgtgattctcatttttattgtattacttttgagcctacagccacattctagcactctagcgaccatgcctgcaaatactcttgactttttatcatctttgagatttctggcatcttacttacttacattttttccttattgttttgtccttattcattcccattagcctctttccctctcctactccctgtcatccccttccctcctcaactagtctgtctgtttgagggggttattttttttctttctttccttcttcctccttcccttcctttgttactcactggttggagttacttaaaggaacaagagtaaatagtcatgagaaaattaccaacaaaagtggctcttcaccccccagcaaccatagctgcctgtagatcctcaggtagaggcggaaccttgtgagtccctccacactccagaaatgttgctccagataatcaaggctgctctcagctcaagagtgcatgcctagaagttggtattccacagcaccccaccccttcccctggctctcaccatctttgagctcctgcctccataatgttccctgaactataaaggagtcatttattctcagcacttgaccagttatgactttctgccagatttctggtcatttagaatccattctgtcctcctctttatgcctttttcacatttgttatggccttgtttgtgatttgtcatccagcagtacatgggctgggagctcggtgcccagtgtcacggtattagaaggaggagtgtgaccctcagaagggaggaatggccttctctggggaatctattgcacctcctcctgctctctcccttctcccctcttgcaccagaagccagtgctggcactgtccatttagacatcccagactgcgcacacacccatctctccctttcccttccctccctgcctcgctaatttccttcctttcaaatgttttgaagcaaatctcacactgtaatctaggcttgccacaactctgtggcaatcctcctgcctcagtctcccaagtgcaagccaccacaccagcattctttgtaaagttttcaggtggacgaagacattgtttctgtgaggcagctcgtcttagtactctgaaaggagaaggcggcagcattcggggtttcctccaacctccgcatcataatgaaatgaactaatgggaaatgattttacattgacgaagcctccttttagctgtggtgaagagtctgttccttttgctgggataaagcactgtggcaaaagcaacttaagagagagtcattctggctcccagtccagctgtaatggaggtggcaacggcagcaggaacttgaagcagttggtcatgttgggactgcagtcaagaaacaccaatgaatgcgtgcatgctcagctccctccctccgtgttacacaattggggaattccctatctctgactgggaccccagggaatggtctcatctacaattaagatgagtcttcccgcatcaatgagtgcaatccagacagacagtcctcttcagacttcgaagaggtctagctcccataattccagatcctgtcacattgacagtgaataccaccacacaaggctatctcatggaccagcatccacaatcacacttcatgtttgcggaggggatgcggtttggttgctgatgatttcacctcatttcctcctccattttccttcgcttcagcagaagattgaaaccttgcaagcacctgactacctaaagcaagcctcatcctgttcctcctcaaatccacgtgaaatccccatgttggcctctcaagccatttggacaaatttaggaggcctggctcacttcgggcctattcatgttttctgggcttgtgtgtgtgtatcacatgacttttgcttcagtgtctgatgtcacctctgaatttctcataagttcagtagattacctaatctttgtttttcgttgttgttttactataggcacagttttcactatcccatgttttatttgtagttcttttagtattaatattttagattttaaaaattacatttgtgtgtgtgcatgtgagtatgtgcacgtgtttgtaggttcctacagaggccagaggcattagattccctggctggagttaaggttgtgagccaatcagctgggaactgaacttgagtcctctgaagagcattaattacttttggctgctgagcaaaagcccttaataatttaatagtctccttttttatgatttatgctttcctggttttgcttgccccttacgccagtttgtctaatatactttttattcatttcaacacagagaagcagacagactgagtaataaatgggtaattctggtcataggtttgcagttttctttcagcaagctatgattctttggccttaacaaatgatgctacttaaaggggagttatagttaactgcatgcaattttacattttaacagtaatgtgtttgcttcatgccaagcatggtgggacatccaccctagtgatctcatacgtctggatgattaccatgaatttaaagccaggttgcctacttagttatttaggccagctagggctaaaaaacaagaaccttgggatatatataacttgggctataactcagttggttgagtgcttgcctagcatgcacgaagtcctggatccatgcctagcactgcatacaactagctgcagtagcacacacctgtaacatcaaggttttggaaatggacagatgaggaagctcaaggtcatccgttaccatagcaagttctgactagcccagactgtctcaaaaggggtgggggttggcaatgctgtgttttccttgcaggcattgtgctactcatctataatcgtaccacttgggaggctgaggcaggattgttgggaaggccactttgggctacataacaacccctccccccatctcaaccaaaaagaaaaaggaaaaatactagtgttactaattggaaaggtcatacaacaagtggataaaatattcagttactacactaaagctaaatggggaagtttccctcttacctcaaatacccccttcacatacttcccagagaaaatcacatcatcactttattaggtaatcttccagaaatttgcaaagcaaacatggatagataaatggaataatttagggcccatagacagggccttccagatggttcagcagatagaggcacttactaccaacctttacaacctgaattgaatccaaagaacccacatggtagaagaaagaccaactcccaaaattatcctgtgactccccacatgcatactgaggcaggaatttcccaaccaaataaataaataaataaataaataaataaataaataaatgggacaaaaaataacccaaccccataaataaatgacaaaaataaaacccatggccatcttttaaactacactttcatatgttatgcatttgcctgtttgtttgtttttttaaacagactatctttgttgtgtgtgtggtctgtacttgagaggcagaaggagcaagagttcaagatgctggttgtggtggcacacacctttaatcccagcacttgggaggcaaaggtctggggtctccctcttctttgtggtccattggccaccagtcgtctaggacaaaggaaacagaggcagcatgcaaggctttttaaggccttcgagtaccacaataatagccttccaaaagtctgcctcagttagacaagtcaactttagttcagagtaggggaatatatagggttcggacagtggctgcccagggcatcacctaatttgcatttggcaacaaggtcctaccatacaggggagcacaatgcctaattataatacggagagcagagggggagcatttgcagggaactatgtcaaaggtcacacttaagtcagcggtccaagctcaggaacagtttccaaataaggtcaagtatccgggcctagagacactatccaaatcgggtagggagtcctgcaaagggaggcctccatgttatgccaagctcagagagctatccggacatggtgagctgcaaccttaaatgcaggggactctaacacagagtcaggcagatctctgtgagtttgaggccagcttggtctacatagtaagttccaggacagtcagggctaatatcaagacccattctcaaaaagaaaaggttattctactatatagcaagctcaaggccagtcttggatacatgagtccctggtcttaaaaaagcagaaactggggctggagagatggctcagaggttaagagcactggctgttcttccaaacatcctgagttcaattcccagcaaccacatggtggctcacaaccatccattatgagatctggtgccctcttctggtgtgcagatatacatggaagcttaatgttgtatacataataaataaaatcttaaaaaaaagcagaaactatgtatatactgtcacatatatgtatatgaatatgaattgtgtatcagtacaatagtatctgtactacatataataaccaaaaacaatatacatactgatatatatatatatatatatatatatatatatattataatagcatacatagacaatatataataacaaaaaacttatagcaagctttcttgtcagactttcttttgggactgccagccccccaataatgacatggagacttgttaattatgaaagcttggcttttaggttaggcttgtttccaactagctcttttaacttaaattagcctgcttctattcatctacctgctgtcacctgactttttacatctttttcattctttttcatacatccaacttcctctgtgtttctctagcatctccccgcctctcttctcccagagttcctctctctccccagaagtcccacctattctctcctgcctagctattggccattcagttttttattaagccaatcacaacaatacatcttcacacagtataaacaaattgcaaccctgtatatcacatctgcacactatatgtaatagtatataacatgctttctgtaaaactccacaaatagccaggtggtggtagcacatacctttaatcccagcactcaggaagcaggggtggtgatggggaatctgtgagttcaaggccagcctggtctacaaagcaagttccaggacaaccagtactacacagagaagacctgtccccaaaaggaaattaatgtagtcatgagagtcagagatcttgtctgtcctaacttctatttccctattgcttgtgccagtatctggcattcggaaggtgttcaataaatagctgttgattaaattatctgttcacaaaatgcaccttgaaaattgctccctgtcacacatactgtatctcatttttcaaaactgcctgaatgtaaaaaaaaaaaaaaatcaccttagagcaaatgtatggttttctctgaaaagataaaataattaactttgcaatggtgttgaacacttttaattccagcacacaggaggcagaggcaggcagatctctgtgagttcaaagccagcctggtctacaaagtgagttccaggacagccagagctattacacagagaaaccctgtcttgaaacacccccctcaaataaataaataaataaaatgattaacatatcaggttaaggtggagacttttaaaatatgcttcttaggggctggagagatggcttggtggttatgagcactgactgctcttccagaggacccagactcagttcctagcacccacatagcagctcacaactgtctgtaactttggttccaggggacccagtactctcacataggcaaaatgccaatgcacatgaaataaaaaagaataaaacattttacaaatgcttcttaatcaaggcatggtggtgcatgctagggtctagcactagggagagggaggcatgagtaacaggaattcaaggttatcatatactacgtagtgagttcaagaccaacctgggctacatgaagccctgtctcaaaaacaacagcagagtgtctctgctttgtaaatttctctggaatgaactaatatcaatatgtgaattaattgtagaaaataatgatttttttaaagaggcaatttgctcataggcaacttacttgaagacagaaaattttctaatgataacactactgcttaagcagcagaataagtctaaataatttataacttagatatatccagaggaacttgaaagcttggcatgggttgaagtcagtagctcattaaaattactacctgccctcactccacattcacttctgggggaaaaaaatggttaaaaactgactattgccgagtgttggtggtgcatgcctttaatcccagcactcgggaggcagaggcaggaggagctctgtgagttcgaggccagcctggtctacagagctagtaccaggacagcctccaaagccacagagaaaccctgtctcaaaaatacaaaaaacaaacaaaaaaacaaacaaaactgactattgttcaatgaaacatcatgatcctgtttggcctataacaaattaactagcctaaaaatcataaaagatttgaaataatcctttgttatttttacatttttccaccaacttgtagaaagtatattcgtgcagagtccttggcggagagttaacagaagtctcacttaaataaaagcaggaagaggaagtaaggggagagctccattgatagggtggccacacaagcatgagggcctgagtctgacccccagaacccacagaaaaagccgggcgtgatgctgcatgcctgtggcctcatttctgggagatcctggtgatcctggggctcattgtgcggccaggagtctaggagtctcaaatcccaacaaggaccctgcctcaaaaatacaactgaaagtagatggctttcaaggttgattctggtccctgcatgcacagccccttctaccccccccacaacacacacacacacacacacacacacacacacacacacaccaggaagcccaaggctgaagctgaggttcaagtacagctagctgtacagagatttcccatcacatctacaggctcccttggtcttcatgcctgcacctggccctaagttttctcctcctgggggagcccttttatgcagccaggaaagataaattggtagtttcagagcaaatgtagacggcaaaaccagttctctttcccattgaggactaggtcaatctgaatggctggaggaagactagatgttggagtgcccaagaggaagggtggtaggcacacaacgctaaaataaactacagtcgaatcccagtcctcgggaggcagaggcaggtggatctctatgagtcagaggccagcctaagctgcaagagtaagttccaggacagctagagctacccagagaaaccctgtcttggaaaaaaccaaaacaaaccaaaaaggataacccacagcctggaagctaagaacctagggagagggaacagggaacaaacggctagaattgtgaatttgtcatgtcactggagcccaagagtgagtgaccagatacttgttttaatttttttcttagatttatgtttatgagtattgccttcttgtatgtgtgtgatctgccatatgggtgctgagaagcaaacgtgggtcctctgtaagagcaacaagtacacttaaccaccaagcctctcaaatacttgttttaaaatggattgctttcatctttccacggtgttatatacagatttttaaagtgtcttgttgtgttctatttgtaagtatttgatgggtgggagggaatacatttagtctggagatcagagaacaacacaccggagttggttctttccttctaccatgtgagtcctggggattgaactcatgtcgtcaggtttgacaacaaatatctttaccctctgagtcatctcaacagctcctgtattctattaataacttttgctgttgttgttgtttatttagttcataatgcagtctgaagtggtagcatgcgcctgcactcacagcacctagcaggcacagatagatcatgagtttcaagctagccaagactacatagagaagtggttctcaacctgtggatcgtgaccccttggaaggtcaaacaatcctctcacagggatcatctaggaccatcctgcatattgaatatttaaattataattcacaatggtagcaaaactacagttatgaagtaacgatgaaaataattttatggttagggttcaccacaacatgaggaactacattaaagggttgaagcattaggcgtatcgagttctaggcctgaccaagccacatagtgggaccctgacctttatatttctttctatcttgtaacattttctcatgcaaagtgctgtcactgactgagtcgtccactgcttcctgtctacccccaatccctgtatagaagagagctgcagatcacctccgagtttctttttaatttcagatcttttgtgggatgctaggagaggtgagacagggtctcctctgtagaccaggctgtcctccaactcagcgatctgcctgcctctgcctcccaaatgctggaattaaagccatgcaccaccactgcctggttagtttcagatcatttttaatgagcagtatttaaaaataaaatgaatagtattttctagttcacattgaaactttgtatttgtgtgttgtatgtttgcacttgtgttcatgtcactgtgtgtgtgtgttgggaggaggtgtcaaagggcagtttgaaggagttgattcttttcctttcacaatgtgaatcccagggataagaacaaaatcaggcttgaccaacagctttccccactaagcctccagcccagtcttgttcttgttttgaggctagtctggttttgtttgggaattcagggtctcacttgtagtcctggctagcctagaacttggtaggctggcctcagacagaaatctgcctgcctctgcctcccgagtactaggattcgaggtgagcaccacatacccagaagctggttcctctacactcgttctcatctggattcagattgtcctttagtggagtcaggaagaaggtggctgaactctgggaaaaggaaaacttaaactgcaggtagtctctttgggagtacacgcaaagcctcagatatttccatcacagaactcctaaaatggaggtagaggcattccctcagaagattctgaagacaaaaaaaaaaaaaaaaaaaatgacgatagtttccatagtaaaagaaaacataactgaagtaatatgtgaaagttgatttgtttgggggaaatctcatagagattaactggtgttttgttgaaagacccctgccccttagctcttaagtttgcctcctccggtcggcagctgatggggcgcacggcggatgcctcgctcctgtgcctccccgatctccacccccgccagcctccacttcccccgccgccgcacgtccggccgccggttccctccaaagctggtccaccccggcgggggccccgtaccccctgcccgcccgcctggcaccgcgccccggggctggggccgagcaaggagcccgagaggaggcccgagggcgagcaccaggtgggccggcacgagggcgaacaccaagtgagccggcctagggccctgcccccgagcccccgcccgatggggaacactcggtctccacccccaaggtcagccatctggacgcggaggggggaattgagtctgttgtaccagacaccagaccttgagaatatgctggtctggaatggctctgtgcctcatttgaaccatccaatagaaatgactctgtactttgcctcatttgaatgactctgtatttcacctcatttgaatgactctgtatttcgcctcatttgaataaccctgagtagcgcctcatttacattgaccaatgggaatagctctgtactgcgcctcatttgaattatccaatagaatccctgcttctcgcttgcgctttttgctatataaggacccctctcccttggctcggcgcgcttggcctcacagaagctaagtcgccccgggtacccgtgtatccaataaagcctcttgctatttgcatccaagttcgtggtctcgctgattcttgggtacgggtctccttctacgaaagtacctcttcggggggtctttcattggtgggtggtgataacagaaaatgattttttttttttttttagcatgcccaaacctgatttacctaggactaacacagaaacacagagggtgtctatgcaggctttaaaaccattctctattatttctgtagaaaaggaaacatgctgaccattgattgtcagaggctctttgggacagtgggttgtgcatcagtgttgcgctcaggtcagagtctgagaaatgactcatttcacatgcattgccttcaacttccatgaaaatggggagggtagctggactcttgggaccacggaacatgacataatgaatactaaatccatttcttttaaaactgttcttatttgtcagatgtgtattaatcatgcaaacatcagagaatatgcctgacgtaagcaaagctataagacctatggacacagtggagaaagagtctggcagagatgaggctccaaaaccagaggagctgagatggactggggatgatgggtttagtggcagggtgcttaccttgcatttgtaaggccctgggtctgatccccagggctgtaaagtaaataaagcccaattgatgtttcaattatctcattgctttactgacatatgtttgtcttagcaaatagagcataaaggtgaagtaagtacattcagaaagaaggggctgcatggctacagggatgctctgtggtgaagctcctgaaaaaggacttgagtgcaattcccaacacccacatcaacattagtaggatacactttgcttgaaacaactccagggaattaagacccaatgccctcttttggttcccaaaggcacctgcactctcgtgtgagcatgcacacacacacacacacacacacacacacacacacacacacacacacacgaaaaaacaaagagaaaagaaaggaaacagggctggaatcttgctgctttgggaaaacagaaaagctgtaagattgaatggttcactgcagtacatgggcagctggaagaccttaaggctttccctataattaactgaaagcaagcttgctttgctctgatgctaggtaaatggggttgtcaacaggtagcctcggaagaaaatctgcatgctgccttcagagaaatgtgcaacttctgcctgggacagcctgagaacatctcttagagtaagctgatgactttagtgtggccctgactcatcaatcaaacatttaaggaaggaccgctcatgcttatgcacccatggctgtgaccttgcatagcctgatctcatgtgttaaatgcatttaatgaggctggagacttaggtctgagattgcctgccttgtccacatgaagacctgggttcaatccccatcactgcataaactggcccatgtatgtaatcccagcactttggagatggaaacaggcatccttaactatatagaaagatgggccagcctgggacacatgaatctctgtctcagaaaaagatacctcacctactagtgacaagtatacactgacaagtatgaaaatggtcatacttgtcagaggagcacagatcccttaatcttagtgatggggaatgcctttctgtatgctatgaaaatatgtttctcttgttggttgatgaataaagcttttttggccaatggacaggcaggatgtagccaggcaagaagtataggtggggctatcagactaagagaaagctgggaagagaaaggcagagagtgattctccagagatgccaggtagctgccaaggaagaaagaaatccaggcatcaccagtaagccaagaccacgtggatgtacagagagtaatagaaatgggttaataattaagagagggctagccaataagaagcctgagccattggctaaacggtttataattaatataagcctctgagtgtttatttgggactaaatgactgtagaaccatcttagtaccttcaaggatgtttacatatcaagtaacagggggtaggtgtccaacaaaagcattctcaggtgcggctgaccaatgtggatttgcatttacaataaaaatgactctgaaatatcttaaatggagatgtacagcctgaaagctgttaaccctaaatgctaatcttgaccagtaacctggcagctcccagccaacagacaagcagagaaactagaaagaaaactgcaaccttacagtaacacttgtgaacacggacctttttgtggattcagtgtgattaggtggcagaaatggagaggacaaaaagcaagcattcaaaaaatacttaattcatttacattttttaaaatgctattcaggctaggtatggtagcatgtgcttttaattccagcactcagtagatagaggcaggtggttcctgtcttagttagggtttctattgctgtgaagagccaccatgacgttgacagctgttataaagtaaacatttatatttaatttaatttatatgtattaaatttatatttaattggggtggcttacagttcagaagttcagtacattatcatcatagtgggacatggcggcattcagggagacatggtgctggagaaggagctgagagttctacatcttcatctgcagacaataggaagtgaactgtctcactggtgtagtttgagtataggagacctcaaagcccacccccacagtgacacatccttcaataaggccacaagcactccaacaatgtcccactgatagtgtttaatagtgccactccctttgggggccattttctttcaaaccaccacaattcctgtgaggccaccctggtttacataaccagttccaggccagccaaggctacataatgagagcctgtctcaaaaaacaaaacaaaataaaaaggaattcaataaacagcacctttcttgtttttaaactggcctttgaaagcatacagatggtgttagaagcagcctcagcagttaaaatcactgttgctcttacagaagacctaggttcgattcgcagcacccaaatggtgactcaataccatccttaattccagttccagggaatttgatgccctcttctgacctcttcagtcaccaggcatgcacatgttgcgcatatatacatgcaggcaaaacattcatacacatgaaataacaaatctaatcactcttctgttgctgtgggggaggcaacgtgaccaaggcaacttttagaagaaagcatttaactggggaattgcttacactttcagagtgttagtccatgaccatcatggtggagagcatagtagcaggcaggcaagcaagcatagtattgaagcagtagctagcagctcatatctgatccccaggttgcagagagacagtgagacagacagagaacaaaactgggcatagcatatgtttttgagacctcaaagcctacccctagtgaaacactttctaacttcccaagcattttccactcactgggggcccagcattcacacatgtgaactgatggggcccattctaatttaaacaccataaacttagatagtataagaaaaaaaatgacagaggcttggaatgtagctgttggtagtgttttcttaggattcagaaagccctgggtttgatcctcaaaaaccttctaaactgagtgtggtacaaacctgtaattccagcactaggcaggtagagacaggaggatcaaagttatgctgggctatacatctctcccagttttcggccagcctggctacctaacaccttgtcaaaaaagaaaaagaaataacagcaaaaaacgactgcactaggtctagtggtaaaggcttatcatcaagaaattgagaattataaattccccttatagaaggccatcctgagcaattcagtaagaccctgtctcaaaagtaagaagagatccagggatagaacacatatctagtacccatgaggttttagatttgatccccaatataatcttcacctccaaaagaagacataatagccaagagctggggttgaggttgcaaatttgtcctgtaaagtcactgtggactctttagtctctgttgcaaccattcaggtgccttgtggtcacaggcaatatataaatgcataggaatagttgcattccaatagcattttattataagcacttccatttgaattgcatttattcttcttgtgcttgggaatacaactcccttttatgctttcaaccatttaaagagataaagaccattttctcagcttactagctgcacaaaactgaccatgggtcatgattttgcaaacaccaaaacccctcttccaggtcattttcataaacaaagctaatgtgagaacaatgaactcagaggggagaatggattttaactcttattgaacaagggcatgtgtactctgagaaagaaaagttgaaagaaaggaaagttgaaacccttgagcctgcttggtgcaactctagacatttccacagcctactttccacagtgaagttacaggatcttacatttgaacttggcttttcgtaagaggacacagagcctcaaagaaattcattagacccagctcagaatggaagatgggttcgttttctcggcaaacttcagatgtggcgtcttgacctaggaagaactgaattaatggtggcaggagagagcagaacagactgaactcagctcctgcacttgagaggaaacacaagaagcaagtgcttcactgccaaggtcaacagaggctatttgaagtagagaactgatgagagtacttaagaattcagagctcggcccgtagctgtcctagcagtcagacaccaccctgtgtcaacccaagtggacttccaggggtgaccctggggtatgctccctctcgggtgggtggggcaggcagtacttcagtaaacaacaaacctcactcaggtaagagcatacagaaggtgctcataaagagcaagggcttgggctgctgtcctgagatgatgacattcaagtgatttctgaacatgtttcatctcccccctccttttttctattttttgtttttttgttgttgtttttaattctttaattactcatatttacatatccatccccccattccctcaccctcccatcctcctgtgttccccaccaaccccccccaacccattccccaactcctcccctgggatagtgaggccttccacaggggaccttcaaagtctgtcatatcatttgggggagggtctaggccctccttgctgtatctaggctgcaatagtatccctccatagggaatgggctcccaaagtccatttgtgctctagggttaaagactggttccactgttagaggtcccatggactgtcttggcctcctagctggcatccacattcagagggcttcgttcggtccaatgcattttcctcagctttatgcctagggtttccatgctctcactaggtcaggtcaactgtttctttgggtttctgcagcactatcttggctcctttgctcatccttcctccctctccacaacttgattccaggagtatggttcagtgcttagctgtgggtgcctgtttctgcttcaaacagctactggataaaggctctaggaatggtaaccaaagtagacaccaatccattatagggaaagggcatcaatggcatcttctctaccactgcctggattcttagttggggtcatccctgtggatcccctaacatttcccctggagtcaagaggatcagaaattcaaggccctcctcagctacacatcaagctaaaggccatctaggactacatagcaaacccttgtctctaaagaaatgaatccagactcctgtcctgctgatccttctaactttattcttctaaacacatctcttgtgtgttttaaattaaataataaataaaaatatttaaaaataagtttatgggggggccgtaggggaggacgggtgggagaagggaactgggattgtcatgtaaaacaatcctgtttctaattcaaatttaaaaagttggaaaaaataaataaatttatgaaaataaaataaggggcccagaggttaagagcactggctgctcttccagaggtcctgagttcaattcccagcaaccacatggtggctcataccatctgtaatgaaaattggtttcctcttctggcctgcagtcattgacagaacactgtatacataataaataaataaatcttcaaaaaagataataaataataaagtaggttgtgtatacttcttacagtaaatatatcataaacatgtgtaactgttaatctgtcaactggagttagaatcactccagctctaggcatgtctaaagagggcatttctagagaggtttaactggagtggatgttaaccctgaatatgggtagtgccattcgatgggctaggttctcagaccgaaaaaaaaggagaaagggaggcaccacagtattcagcctctgcttcctatggactgtaactagcctcctcatgcccttctgccaacatatggggctgcttccccactacacctctcgtgccatgactaatgtccttcaactctaagccaaaagcaaacctttaccgtctttgtctttgttaactgcctaagcaaattacgcttcgttattgtacaataaaactaataaaattgttaaatgtttataaagtctcattttataatacttgtcagatttttctcagtgtgtatccatcttctcatgtgcatttgtgaattatgtactaaacatattaatcccaatgttgtaatggagcccatgattttatgtgccaactaaaaatagttaattttaaaatgatgtttctgcttactatttaaagtacaacaggggccagtgagtagacacatggttcgctgggtagaggcactgccatgcatgtcctgtggcacatgtctgccccgcccccatacacacacactaacaatgcatatgcctgtttaaaacaagtactttttacatttttaaaaatattttaggctggggctggagggatggctcagaggttaaaagcactggctgctcttccagaggttctgagttcaattcccagcaaccagatggtggctcacaaccatctgttatgagatctggcaccctctcctggcctgtaagtatacatgtagacagaatactgtatacacaataaattaatcttgtttgtttgttttttttaaaaaagttctctttaaaaaaatattttaagctattcatgtttcacccaccagaattttctttcttagaaaaccaatgggtttccattaaagtgtccaaaattattagcatattgtatctacagctatgtgttcttcatttacaataggtagtttgttgttgctgtttcttgtttggcttaccacagtgtacctaatttaccggtctcttcagaactcgactttttggatttaaatttaaatcccatttttaaaattttctcgtgtctttcttagttattttcattttatagtttcttgaattcactgcctattttatttgtacacactcatgaaatataacaagacaacttataagagaaaatgtttaaactgggaggtggtggcccacgcccagcacttgagaggcagaggagagcgacagagaaagagagagagagagagagagagagagagggagagagagagagagagagcgcatttaatttggtgctcacagtttcagaggattagactccatgatcatcatgacggtagtcaggcaggcatggtgctgagctcacatagtaatccacaagcatgaggcagagtgagtgagctaactcggggtgatgtaggcttttgaaactgcatacgacctctgacaaagccacccatctttcatccttctcaaactgttctaccaactggggaccaagtattcaaatacatgagcctatgagtccattctcattcaaaccatcacagtgagactgagtttttctctatttaggctatattttgaatattttaattttttctatttctatagcctcagactctatatattgatttttctttgacctcattttaaaaaagatttactattatttttaattacgtgtgcctgggttgcagtatgtgcacgacacccctggaagccagagttgttggaccctctggctgaagctggtgctggctgtgggtgttgggaactgcacttgagtacagtgaaagcagaatatgctcttaactactgaaccatccctgcagtccttaaaacagacaaatgaacaacaaacaaaagaaaccagagtctcaatatgtatacctgtctggactgaaacttgttacatagaccatgctggccttgaactcagagatctgcctgcccccgcctcccaagttggccactacacctggtttgacctaagagtttttaagaaagtcagtcatcttgtcttctccactcctccttttccccctacccaccttcccatgtccccccacactggcattgaactcataaccttcctgccttttagcccgaaaatctttgttaattactccctttattgtctggtgatcagagaatgtagtctggtggtttgaatgaaaatggacccggataggctcattgatggaacgtttgggaagtattaaggggtgtggccttgttggaggtgtgtcaccgtgtggctctgaggtttcaaaagcccatacccatcccaattagctctctgtgcctgcttgtgaatggagatctgcgctctcagcgactgcttcagcaccatgcctgcctgcctgctgccatgctccctgccaggacagtcatggattaaccctctgaaactgtaagctcccaactttcttccacaggtcaccttgatcatagtgttatcacagcaatagaaaaatatctaagacataatctatgtgttatttatagtcttatgttaacatagtttcatggatacttaaaaataatatgtaaatctggaatgatatctttcaccactcaggaggctggggtgaagggactgctatgagtttgaggctaacctgggctacttccagagcagcatgagctattttgtgaaatacacattattcatacttttttgggttacattttatcaattcttcctgctttatcattttactttatattttgatagaaagttattaataggtttttctgccccaccctaccataataagttcatccagtgatgcagaaagccaaatcaagccaaactgaaaaagtgtaacaacaggtttatttgagcagagaaactcccaggtgggttctctgttcccagagaccaaggtgggggagacttcccagactgtgtaggggtgagcttgaggttctaaagaacaatcagatactgttatgtcttcacataatagacgatgacataaaattatttctgcaacccaattatttctatcttaaattctattagtttcatgtttttttaaaagattttatttatttattatgcatacaacattctgtttccatgtatatctgcaccccagaagagggcagcagatctcataatggatggttgtgagccaccatgtggttgctgggaattgaactcatgacctctggaagagcagtcagtgctcttaacctctgagccatctctccagcccagtttcatctgttttgatattagtgactgaactatgttctttggcctttgtgttttaacagctttgcttttagcctttgcttttcaagtgagttgctaagatgacaagcctctcaaatccaaaagcctcctggtcctaagcatcttagagaagggacactcagcctgggttgtctatgctacttacgtttttcctgccaagtcgctcgttcctcagtttcctcacctaaaacagagagagaacagaaaaaccacagagctgctgcagggattaaacacttggtaccatggttggcacacagttaagaggttaataaacaacagctagtgttacagaaatcatatgcacatacacatgcatacagacatacagacacacacacacacacacacactcccatgcatacagacagacacatacacacactctcccatgcataccaacatatacaatttggtattctttgctccccatgacttctcctgactctggaaaatggtctgtgatcctaactcaccacagcaggagctcaggccaagccattaagattttctgatctgtatctagcatgtacatgcattacatcaaaacataaatattcccctccagcataatgcagtggtttccagtgtggcctccatcccatgtaccccacagaggtctgtgaagagcagatcccaatatggcacatgctgaaaagcacagggttaaatcatcctggcacttgtcatgggaatctgtgaacacagtgacaaaaacgactttctacagagcgaaatgtgaccccacagaagaacagaatggcagcaacaatttaatctttatcatttattatttttatttggacaacttatatacatatgtacaaaatacctacggtcagaatcctcttttataatttcatttgatttacaaaaacgggacagcaaaataacttaggtcactaatactgtacaaaaataaaactgattaaacagttgtaaagatcagtatcttacagtgttacagaccattcatccgctgtgaaagaacatcttatctacccagagtgatgagtactgtgctaaatctatctgcaaactgacaaactaattggtttctgtaattgtaactaccaaatataattctcaaaagaagcgtgatgtggagcttaaagccagggtgtcattccacaatggtgaagggctttcttcttccctaaccaaggagaggagatatcttaactctaaaactagtatattttccatgaatgacaactacttacagtattagataaaacggcttctctttctttttaaacacctgcgatcgtctttcaaaaaattcagtttggttaaaaaagtaaacaaaaattactatcctgcatttggatttttatacgttaaatccatggtctttttaatataaaaagtaattgtctcatagttttagtgttcaatgaactctagtagtcctatttgaaccatatttccgtgtagtaaatctaattagaatgctgcttcctgttctgtgacgcaaaacaggacttatcacaaagaataaaaagccttgagtgtatacgttacgttactagaacatagaagagaatatcaaatgtgtgtctgtcaacaacttgaaaaggcaagtagcaactcttccgggaagtaaattgtgcatttttttttttaaacaagttgctgcgtttatatccatctaagtgtttgacaagagccacatacagatttactcctgaaacaataaagattgtctttcactgacttggttttccttcatttctttctgtgagggaaagctgagtttatacaagttagcaagttgctaggcaacctcaaactcctcactcactaaaaggcagcgcgcagagtaccctatgcatagcctttccatgagctcaggaagaaataggcagcctaacctatttcatatggaagaacagatgtccttaaaacttattttggacacagaaattaaaatttggtttaaaataagcgtttcaaaaatctgaaacagaggtagaaagtgttctttatttttcctgacatgttttctcgtgagaaaacactttccttttttagctcatggactgctcccagtccctaatgttaaaagcagttctcttgctagaactactgatacaactccattggttaaacagaaaacactgtgctagtgatggctgttgtattggaagtcggagtcagctgtgccccacgcgctgcaggagcacccgctgctgagatgggagtgagcatgcgctgggtgaaatgtggagctcgctgcaggtgagaaccccgagtttacacaccatgtgcagcacatggctaaactagagtgcaccgtagctccctgttttaaatatcagataaaatcatcagaaagtggtatttctgaaggaaaaaaaaaaatgtaaacatttccccatgatcactgctgactcccctcaattgaggttttttgttttgttttcatttttttttttttaactatgaaaactagtttgtttttctggccatgtaaaagccaaaattaagttttcagtaaatggcataggatggatatagtggttcaggccattgtagacacctaaataacaagctaagtagtggtagggccactgatgcagacagctggtgatgtgatgtcactcatgtaggtttctttgacctgtgttcaccagaaggggctgttctgcagagtcgcctttgaaattattgtggtgtcttcccttggtactacttataggggcaaacggtttgtttttgttttttttttttgtgtgtgtgtgtgggtttttttgcttgtttttcatatttcagctccctttcctttgctatctcttgcaccttgtagtgggagtctcataggaacacaagaaagcgaccaagaaatacccctccccaccccaaaagaaaaccccaaaagaaaacaggcatttccaggcctggtgacagttatgcacccattgatcaactaaccctagacagagccgaatgctcttgctctgtgtcctggtgccatgagtgtaataagatgacgttatcagaaaggacggggaaattcgaattcatgaagttaaaattgttcactttcgcatttttgaaatactaccttcctccccctcctcctcctcagcatgtgttttatacattctgccctcactcacatctctgccgtgggttctcagggaaacgtgtatactgtaaaataagcagattataacgtggtgccaaacagaacgtctgcttctaccctcaaagcaccctcggtatcagaaagtaaaagtgcagtttatgttcagatagtacgattcatacaaagcagggtttgaaagttccggacttaacatgacctctcgaaggtttgtcttgattagtgtgaattcggactctgcttatccatagactataagtaacttttgtttgtttgtttgttttcaagtctttagatgacagatcatgctggagtaggtgtgctcttgcttgcataaaagacagctgtgctatggagggattttttttttttttttttaaatctcaaaagttaaagtgattcaagagagtggttctgctaaacaaactgaagcacactggtcgttacattaaagagaagaaaacaattccgagagtcaacaagcatcaaggacccagagtcactgtgggaggccaggggtcaactcacccagtcagacatatgtacaccagtgtgaatcttcaaaatcctaccccgagtcttggccttgcccccttcctcccacccccccacccccaaaacaaaggagaaaataccaaaagcatttgcctgccctccaacagtcaagagacggttccaagttgcctctgcaaggggaccaaatgttgactttgatcttaggctaccatgtgctttttggaaacagtacagggaaagtatcagactaattgaccaaagagcagtgacctcctgtggccagcgcacctctgctggggcgggtttccacgtgtccgtctgtttcctgggagctttgtccttccggggaccatctctgcctggctgccacggggagcacctcacaaggggctggcaagagccttttttgatcgcttgatcatgctggggtggaactcggtgtgacgccgggcgtgcttggtgaggtggtcactcctcatgaatctcttctcacacagcggacagcggaactgcttttcgccagtgtgggtccggtagtggcgggtgagctcatccgagcgcgagaactttttaaggcagtctggccacgtgcagggaaagggccgttcacctaagagaagggaatcaagaaagaacactgttgagaggtcatgtcaaaaacattctgaaggccatctatggatgacaaaccctatgacacaatccccttgtcaggagttttatgagctctattgtgtttctctcaagacctcaagtcctgaacgctcacaaacacgtctcagaatgtggctgtatagttgttccccggatccatgggctccatatctagattcaaccaataatggatgtaaaaatatttggaaaggaaaaactgtctcatgtttactgacgttttactgtcatttttcttcatgatagaatacacggtgtttacattgtattagatactgtaagcaaatgcactatctaagcaaataaaaacttgcattttaaattttaaagattctgtatgtgtgtgtacatgggcatgtgtgttatgacactcacatggaggtcagaggacaagttgtggtgtcaggtttcttcttccatttttactggggcactgggattggattccggtcaccagacttgcacggacgtgctacctgctcaaccatcccaccatccgaaatgctcacatttttgttcagggctttgcacctgaggatcctggcatggaagggggtgggggcttggtccctacaccaagtccttaaagaggtaatggggactaaatgagctcactgggtgtggaccttcaccccatgactggtgtccatgtaaggggaacaggcagggccatgagaacagtgagaaagcagtcaccctcagacagacctctgtgaacatccagactccagagacaaatgttgactcaaccatccgtctgtggttccttcttctggcagccctggcaagctaggctatggggaaatcactgagaaccctctaagcaaataagctcagtacctgtacccagtgatcactcactcacaagtctttttataccccttctaattttatcctgtgcaattgttggtttcatgagatcttcagatcaggccaaagaccgagccctttgctccatttcctggcattgtagagatgaaagtaaggaactgagaggccaccttccctcccacaacaggcacttcccttagacctccccaggactgtagccacctagcatctcccagcaagtctgatgataggaagccactacctggggtggcagcctggcagcgcttgaagataagctgcacagagtcttcattgttgtgaactgtgccctcctgcaaagctgtcttctatgtcacaatgtctcagcacccagctgtcactgttttaccagccatctcttcctcagattaaacagccccagtccctccatcttcctcccattaagtgaagacagagggctagggctacccattcagtttcactggcttctcatggggttgtcgtcccccccaaccccgccccacacatggcggccatcatacagatgagaaaatggagatttggagggttaagttacttgctcggaagccaggagctcactgtctgcctgatgtcaagctctgggcttctagctactcactcggctgtccagtgctcacgggtcatgaggacttggcacttttctatatccctctaggttctgactgctttcttaatgttggagtcacaccaaatcatgccacacctagaatgcagtcaaatacatgttcatggtagcatcaagagatagccatcccttacacaaccaccaagatactagcaaggggcatgggacggtgtcatcgcaccagaaggatacataccagcacaaaagcagtctctgctggttaagacaaggaccttagttgctcttccaagtacctgtcatcaccctgttctgagaccacctgcctgcccttcacactgttccaagcacagtccaaaccagctgctttgtacacacaggctcctgtttccatacagctctccagacaagcctttggtaggcgtgaggagcgatcattttcactcctgtcccaggcatgctggaagctggaaagacactgcagagtctgggagctgtccagcacgacgcatctgagtcatcaggacgtcactctctcccttcttcacctgcaccgatgagatgcagaaataatgaagccgagctagccaactatacctgctacctgcagtgttttctacactccaagcagagcccaggtctaatactgcacagcctagtcattcttaggggaactcaactgggcaaagcacaactacatgcaagcttaggctaaatccttacagcaagaatgctggagccaaccacaggtgagagcagagaaccaggagcgatattgcacagatttcctaagggggtcaagaaaaaaaaggcagccagaaagcttacactgaacagtccaaagcaaatccaaaacaagcaaaaacaggggctgcaaactcttgctgaacaaaaagcattgcaccaacttcagcagatcttggagcataagttgaaattcagattgtaacaactctatgactgagcttcttgtggcaagaaaaatattctatgcaacttttgtattacctatttgcccagaatttatggaatgtccaataccagtgtgtgtgtgtgggggggggtgggctccaagacccctaccccaacatagataccacaatcttaagacttattaagtcccttataagattatatattttatatttccataaacacatcttatatattttcaatgatccctgggctacttatttaaatagttgttatatttcattgtttagggactaatgacaaggaaaaagatcaatacatgtttagtagaaatacatttttcacgattttttttttttaagacaggttttctctgtgtaacagccctagctgttctggaactcactctgtagaccaggctttcctgaatattttttatctgtatttgattgagtcaactgatatggaacccacagatttgggaccagggagaggtaggggtgtgtgtgtgtgtgtgtgtgtgtgtgtgtgtgtgtgtgtgttggggatggagggggcgtaatttatttccagaccactaatattgaccaaaaaccttctcagaagcagacttcagaactagtctagaactaggttgcagcaaagtcctaactgcaaaaaagcatctatagggaaatgtttttgtaaacaatggtatgttaaaaatataataacagtcagatggtggtggtgcgagcctttaattccagtactttgggaggcagaggcaggcagatctctgaatttgaggccagcatggtctacagagctagtgccaggacagccagtgttatgcagagaaaccttgtctcaaaaaatataaacaaacaaaaagatgagtaagtaaaataacagaaaataagaaagcaagctgagcttgggatctcagcatccaggatattgaaggagaattttgcattcatagtagcctgggctacatagtgtgactcctatctttcaaaattacacacacacacacacacacacacacacacaattcatattatataatggtgaagatataacatagaattcatagaataagcttcaagcaaaagaaagacaaaagctcttgcctttatccttgtgacctctatctactgctctatgaggctcaggaaaagcatcgagaaagcctaaaataaagcttttgtcttcccagagcttgttagtgaagtggctttcttggcagcagatcacatggtttagctctctcgctgacacctgtagttataagtcaactgagtcaggaaaaggaggggttaatcccatgatctgtgcctcgatccagggaaaaatgttggcaaagctgccaagaaagggacttccctcatttagaagatggctgcatgctgggcgtgttagtgcacgcctttaatcccagtactcctgaggttgaggcaggcggaactctgtgcgttcccagttagcctggtcaacagagtgagtttcagcacagccaaggttatcacacaaggaaaccctgtctccaaaagccagtaagaaaaaagaagatggctaagagaagtgtcacagtggaaagtgtctccaatcaggaacagtgttcatgctcacacttacatagagaggatttaaagggtacataggatttattctcatgagactcacttccaatatggctaatcaccatttgtcaatcttcccattgcacctaatacaggtgctgtccttgaggggcctcctcgtccctgagtgtttcagagagaagagactagtccagacttcagagcaaggccagagccaagagcagcctttgctgaactcatttcacctgtacaccaaagctggcagcttacaagcagttaacaactcgagccacagctgtaggcttgggtcttcttatggagtacgtttaaaaaaaaaaaaaaaatcagtattttggaaaagcatccaacagggctggcttagcaacctacagcccacagaccagaattggcttgccaaaagccaggaccaaatggtaagaaaaagagaagggtgccccgtgtcagagaaagtggcatgaaatccgcattcatgtcttatctggatcctgggttgtggtagggtccacagtcatttcaagagtaatatcctcttgacaaacatgtaaacgaaacacgataaaatcagccagtggtgtatgtgtaggcctgcctctgtatggaaacctacttactgttttctcctcttcaccaaagtgaaaaatgtgcacagaatctattatgggatacatgatgattatttgtgaatggcagagacaagatgccattgaccaagtgatccgaggtgtaaaacagaagccaggcatggtgggcacacttctaaacctgactttcaggaggctgagtcaggaggcttgccacaagtttcagaaaagcctgtgctgtatagcaaaagttcaactcaaagaaaaagagaaggaaagggagaatggaaaatcattatgcagagaggagcacatgaggctgaagagaacagagaccttgctgagaagggaaagcaggcctaggaactgtgacctgtcatatcccagttacactctaaggcggaaccaagtcaggctcactccacttcctgctaaggtcaaagggcaatggccagccttctccatggtactcacagcaaggcaagcatcagtcagtgggtccttaagccagtctgttaatgagagttaccattctcctgggggaaaagcaggcttgtgctggagtttgttcctggtcttctcaagaaaacacacccagaggcaataacgcaataaactctgccttcctggagcagagctgctgctaagagcccaagttgccgaattctcgttatttatatcacactccccgcccctctcagcacaagctaccacccgactgacagactcttcagagtataaaataaacttgaccataaaagtgactgaacttggcacaacatgagcaacagacttgctctgtggagacaatcaggtctctggaatgctctcaggcccacagtggcaagagacaggccaaggagggccttccagttacgctcacaaagggtccacactgcttctcagaaggaactttctggttactagcaatcagtcagtcctaatggactggatctcgaatgtgtctcagaggttccggtgttggaggcttggtcccctgctgatgatctattaagaggtgatgggtcggctttgaaatggagcctcatgggaaagttaggtcattgagggtatgtcctcaaaggacatattgaggccctggtccctcttctcacccagtttttcagctaccatgaggtgaacattactatcccccacacttccactatgatgcactgccctgcaggctcaaagaaactcaggcaaccaaccatgggctgaatcctctgagaccataagccaactgatacagccaatggcaaatatagctcattcttatcggggaaagtcctgaagtgaatggagctgagactccatatatgagaaaggggcagggtgcttggcggtacacagcctgtccgccagcccttcccagccccatgctggctcccctgtgttctcagtcaaggctgccactgaggtccgaaccagaagtcacagaggcctctgccttcaatccctggtttttctcaccttctcttccttagccagagagggctcaaagggggtcaaggttacaaaaccaaaatcaaatgctctcactgcttctttccggccaaagccaaccaacctggtaagaaatctaagagaaggaagcttcctttgcagaacagaactctaccagtgtcaatcaagaatcctagcttcctccaagtgcataaaaccaagcctgcttcttcaagaaaaacaggtttgttttttaacagcaaaaaacacactaacagtctatggaaaaaaggataatttggcattggaaaagacattactgctatgcacttacagatgcacaccttgatacatgcaaaacacttgataaaacttaatgttcctcgctaatgaaagctttcgggaaaacagaaaaaaaattacttaacaagtttaaagaacaagaatctgaaaccttccttcagcatacaccagtaataaaataaaagtccacagccatcagggaacacctgccctgtcattacaatggatctctgtttgggaaatgggagtggatgcagttaggtgaggaaataagagtgaatgaagtctatgatttgcagttgatactctttttgactgaaaagtcaagataactgggggggggggggttccccatctatgttgcaagagcaggagctactgctctgtgatgagctgctcaggagcagtcaggatagacctaaaaatgaaggctcaggaccttcacaactataccataagaatcaaagaaaacacataatggaatagctctcatgtcctcaaagggtgaagattggtggtgggacaccacagttctgcacaaactcatccacgacattcacacacattgtacgaatttctttttcttaaacttgacaaatttctgaagttcactttttcagaataagaataaatatgcctggcttgccaggaaaattctgcagaacaatagtacttgcaagactacttattaaaatatattattaaagctataataattaagattgctagacaccagctcagcaatagagcagaactgaaaacaaacccaagaatccatcgggattgagtgtatgatttagcacatggttaaacctaagactctatagggattttgtatatggtaatggagtatttcaagtcagtgactatatatattgttttcattataactggaacatcagacaaaaaattaaatctgtactcctatcttatatcttttacttaaaggaattgtaatggcttataagggtaaaactaaacaaaatacagatcaatgttttgaatcatggtggactaaaggctttctaaacctaaagccaaaacaaaatttaaggatattttttcttagattttgtttttgagacagggtctttctctatgtagtctagtctgacctcaaattcaccatgccccctgcctcagattcttatggcaacatatatgtatgaaactttatacacattataaaaccttatgaaacaaaacgtgagccatgaattcatgaaattatagcacataacaaagagtaaaatctataatacaattaggaacacttgcaaatcaaatagcagggggccggcaagatggctcaggcagtaaaaatgcttgctatgcaagactggccaccagagtttgatctccagaagcagtaaaagatagatgcagcagttcacatctgtaatggcagcatccccagaatgatgggcagtaaagacaaaagaatcacttagaaggcggaaggccagcttgcctgtagtatgcagcaagtagaaacaagatactccaccctcaacatgctgaaagaaggaaaccaatccctaaaaaaacctacacacacacacacacacacacacacacacacacacacacacacacacacactttacaaaaaaaatttttttaatagggctagaaagacagctcagcggttaagagcactggctgctcttccagaggacatgggttcaattggaagcacccgcatggcagctcacacctgtctgaaaactccaggtccaggggatctgatgccttcacaccaatgcacataagataaagttaaataaattattaaaaacattttaataaattaacaagactctacacaaagtactaccggaaactatggaaagctgcaagggggagagatgatattccccaaggaagagcacatcaattggttttccagggtcaaagggtcagccctgaaaacatatatataagtagctttatacagactaaacaggttttatttaggcatatatatatatatatatatatatatatatatatatatgtaataacagctagtgaaaaaaagaggccacgaatttgatggaaagaagtgagggacatatgggagggcttaaagggaaaaaaggaagggagaaatgtaattacattataatatcaaaaattaaaatatatatgtaacaatatcctgatggctggagatacagctcagtgacacaacacttgcctactatgtgcaagaccgtgggtttgatcagtagcacatataaacacacacacacacacacacctgggctaggaagatagttccatctctggcacatgcttaaaaaaaaaaaaataaaagctgggtatagcaatgtggatgtataatcccagcattgggaaggaagacacaagaaagcctaaagtttggtagtctagctgaattggtgaactccaggttcagtaagacacaagcagatgtctgtgagttcaaggccagcctggtctacatagtgagctccaggacagccaaagagagacaccacctcaaaattaattaaacaagggagggaaaactggtcgggatgtattgtatgaaagaataaaattttaaaaagtgaagactaagaaggacatgaggtcaacctctggccttcactctagtgtgcacacatgtacttgcacagacatgaacacatacatacattctcatacaaaataatagcctaatgtaataaaagtggacaaagatgtaaataggaaatttacaagaggtactaatgatcaagcaatactatataactaggcatggtgggggcacacctgtaaccctaacactctgaaggttgatgtgggggatatagccataaacataaggcctgattagactacacaagcgagaccttatctcaaaaataaaaataaataaattcaaccttacaaagtcatcaaaacatgttgaccaaggcaccaatgagccagggatggtagctcacatcccagtacttgggatactgaggcaggaagattgccatgggtttgaggccagtttgagctacttagtaagactatctccaaattataaaaagggggagagaaaaagaggttggggtatggctcctagcatgcatgaagcctaaggtttgatctccagaaccacagaaaccagtcatggtggttgcagcactgggaaatagagacaggaaggtcagaaactcaagctcatctttacagtgagatctagtgagcttgaggtcagcagaggaagaaaaggagcagccatgcccattctcctgtgctttcatgtgcagataaagacagacagacagacagatatcaaatatttaaaagagcatggtgacatattacctgcaaccctagcatttagtagtaggctaccacaggagacttacaaatccaaatccagcctggtttgcacagtaaattctaggctaactgagttatgtaaagacattgtttcaaaaacaaataaatgttttctatgtgaacatatacatttactgaaaacgatgatgcatttgagcttaagctattctacagattatcaagcagtattccaagattgtttgttgtggcacatgcttataactcagcatttgggtagctgagactacagtatagagtttgagaccagtttaagtaacatagtgagactctgtctcaagaaaaaaaaaaaaaaaaagccaagtgcatctcagagtctaaggccagcctatacagtgaactccaggccagtcagggctatgtgttgagaccttgccctaaaacaaaacaaaaaacccaccccaaacaaaccaaccaatgtgttctgtgggagcatagatgtgtacttcctatgaagaagttagtgagtactctaggtgtcttaagacatgaagggagaagtcactgtttcctactgagacaactcattagaaccttttgggatatacggctgctgtctgctgtctcacacttcccacacctcctttcctcccctttccatatatatgacctagaaatggccctaaacaagaacaaacaaaagacacccctccacctgagtggcatgttatgtcccccaatcggcaaggctgtccaagaacacggcctcactcatggtggctgacgtgaccgggttccacacagacctgcccacttctctggatgtccactgacaccttcctccacccatggaacatctgcaggacacaaacacagctacctccaggctccagtgctctcatgtgcaaacccaacccaacccaacagtttgggaacttctcagacagaatcccatcatcttctacataaatcactttcatgaacactggactcaaatatcaaggcaccaactgtctcctcaccagaagtactgtcacacccagggatgttctgaatgagcaaggatgcctggcagcctctgaaggaacaaccctgtccccacggttactgatctcagtaccagctgctccacctccctcctgcagcctttgtggttttatgccttttatgttttttttttttccctttgatgtgagatattagtgctcactctgtgggtaccacccatactgcgggtatctgtgggaaggaaaacagcttgtgctccagtgtagactctttaaaggaagtgggtgtgtcccaaggcacactgcatgacagtcacttgctatctgtggagtaaacctgcttgctattgtttgcatgaaccccacactcaatagatccgtgagaaacaagattcgagtctgcaggtacttagcacaccaggaactgagtctcgtggcctcatcttggaaatcctaaaacccatgcagaggcaaaataggaacctgaaacatattttttagcacaagaaagatctgcatcttggtaggcttcactagaaggcattatttaagtcagtcacagaatttagagctggaagctcccagctatgctccaaaggccccacgaacacacagctggttcctcagaaagcagatcccagcttccaagtgctggttctcaggtcagcctgactcctcctacctccgcccagtctactgtagatgtgagaaatgaatggctgagtgggcctcaatatcaaacaagaagcgaatgctcaataacgatctcagacacgtggattctcttcctctcactgatttctaacggtcaggtttcaaacagccagctcaaggggcaggtgatttgctcacggacactgcagagaagtgcatgaccagtttaaaacccagttcaaatgcttgcttcagttttgtgactaccaaagagatacaagaaaccagctgaggcttgaactgaatagaaagaaactttcatggcggattttgcttactatcttcctgtttcttctttccacatgcattatcaggggacaggtagcattgttagggcaattaagtggctatcctgccagcttcatgtttcaaagtaacatattaaaaatgtagaacaccaagcctggagctgtgggtcacatctgaaattccaacgtgagctgaggcaggaagagggatcaggagttcaaggtcatcattggcagcctaaggaattaagactaggctaggctacacaaagctctgtcttaatgttaacaaaaacctatacaccctaagcttactttccctggatttgccagcacttccaagaccttggagtacacatgctccctgacctacgatggctctgcctagaatctaagatctatgccttagatagttcattttgttgtagtgcagaagcaacaggcctcagcagagactgtacttggaatgtgatcttttcctgggcatgataccctctgctgatgctgggcagcagtaaactacagtccccagccagccacaatcaggaaggaagccctatggtccatagtgggctaagctaagttatatttgaggcttacatgcatctttttctaccttctatgttatttccaacctacaataggcttgtgatcagcacagggattcaaagaacagccagcatccacgcagacaatagaggtctctagggagcgccagaggtcttcacttccttttacaaacagaccaggaagtgctcaagaaaagctgtccttgcctaaacaagccatttctataattccagcagttaggaggctgaggcagaaggatccccttgtgtttgaggcctctccagaatgcaagcaaagcttgtggaagctcaggctaggcagcccccactaatgtcacctgaggggctggactcctgtggccaggtgggtcattcctctatgcagacccaggtttcctcttttccaaatgggtaaagaaggactagatgcctttggaagaagacagagtcacagatatcactcctgtagctgctgtgcagaagccctcttcaacacagggtatcagtgaggataggacacacagtgggtgtgtgtgacagtcagtggagaccaccaagcttcaggaaggcttatcacatggataacctgtcacgatgccagagcaaaaggtgagccagcacattccacatgagatatcactcgagggaagaaaggcaaaggacccccaaattagagcagctgttttgaactttaacctagaaagacaatacagtgcaatacattaacaaaccatttctagaattccagcacttgggaggctgaggcagaaggatcaacttgagtttgaggccagtgtgggctacagaagattgtcttttttttttaagattttatttatttaatatgtatacaacattctgtttccaggtatatttgcacaccagaagagggtaccagatctcataatggatgggttgtaagccaccatgtggttgctgggaattgaactcaggacctctagaagaatagccagtgctcttaacctctgagccatctctccagcccccagaagattgtctttaaaacaaaccaacaaacaaacaaactcactgaccctaaatagaaaagtgaccaagaactcctaagctagagttattttccaacaacagaaatgggaaggctagggcctgattagctatacccaccctaccagctagctaggctatgacagatgaagcctgaaagtgagagctgatgctctaccatcacttgtctccagcttcccctctggggcctgaacagtgctggtaccagggcatggctgtggagacagtcttactccacacaggtccccatgaaacagcctgagccactaattcttccccaaaaaaaaaaaaaaaaaaaaagagtcacagattacactggcttagtgtttatcaccaaagactatgaagtataggtctgagctctccaaacacgaagcagtaccatgtccccacaggagctggccaagtgacccaagctggccttggatgctctcagaagctgttccttctgtctaaccctttccaagtgctcagactagaggcatacccttcacacccagcttcattctgctattgtctttgaaactgtagtgttataaaactacaatggaatatggcagcccaggaattgaagttatgtatgtacatttgaatgtgtgtgtgtgtgtgtgtgtgtgtgtgtgtgtgtgtgtgtgtgcgcgcgcgcgcgcgcgtgtgtgcgtgtgtgtttaagctctatgttctgtttcttgtatttatcgtgctatttctgttgcgtactgtgcacactgaaaggatttggggatctcaatgggaaccactacatcaatggctcatctttacccagaccttatctattagcaccgtggatagtaaatgttcatgtgaatatgattcactcctccaagcactgaaatggacaatctggagtgaagatcttgtaaatacccttgagattacactgctgctgataaacctggctcatgtgaatcttttggtcttagtctcctgagcatctatctcctcaggagggcctgtgggtggtgtgtgagcaggtgcaacacatgttgaaatcacctgttctctgcaaagtccttcctgtctgttcactcatggaccatcttttccactaagctccagagagcagagaaaacaaatgatgctctttggtgcatcctgcttgcaagctaagtggacataggtatttgatttgccttgtctggcctgtattacctcttcttgtaaggaacagagagcaccattttcctcctgcaaccaatccttcctctgagtccttgtagttcaggagctgagcccacaccttcagacttgagaggcttggacgtgatggaacccagtcctgccacactgacagttattcataagggacacacaatttaggctcagccgtggttaaatgcctgggtcatttgctggaatcattaggaatgggaagtagtctttccgtgtgtgtggctctgctgaattggcaggaagtgagtctggtgttgcttggcagccattttagcaccattcagagagaaccagctcatgaatgaagccagagccagcaacagggtggcaaagccatacagagaagggacagagagaaaaacactgaatgtctggatccagcaatgcctgaacctagagctctattttcaatttaaaaaaataaattaattaagctttgctacgtagcctaggttggcctctaacacaaggcagtctaatgccccagcctagcaagtgttgggattacaggtgtgagacaccacttgtaaagcactgtttctactaagcaagtctatgcactttcttgcttgcaaactgtgtatggatccaaaacccaaaccctgcacatgtggctctggcctataatctccattctgaaagctgaagcaagaagaccaagaacttgaagacatcctagatcacatagtttcagtctggcccgagctatatggctagaccctgtctcaaaaaaaaaaaaaaaaaaaaaaaagcaaacaaaataaaagcaaattgaaacaataatgacaaaatagattttttttttttctggttggaagtaaacaattttggatgacacagtcgttgtcagtagttctgttgactttcctaaccaaggctcatgaaaaccatcttcacatcagagctgggacacaaaagaagacagctcacgatggctttagaaccaccaaacacaaaagggccacaaaaaccacagaatctcttctcactgggagaaagccatgggtttaaggtcaacagccctcacaatacaactcttcaaaactagaaatttagttggaattcccagcataacttggactaggttaactaactagtctgattcctcctagtaaataagaaaaacagtacacttctatctcgtgggattgctgtttagccctagagctgacatactacacactcaacatggcacttgcgaagtcacaatggctatcaacttttaacacacctttcacttgcgtcactcagtatcatctaatgctactagttccacctagaattttaaacaagaagttctaagactctcaaaggtttctgggatctatatgtaaagcatttactttaattgtaataattctcagacaagattagcatgctaaatcttttaaatgcctcccctcctcatctgaacttggcctcataacttcatgaacatgtaattagggaactccatctcacaggtgagaaacctgaagttcagggacataaaagcttggcctgagtctttgtgataagagtaagggagtcagggataggtccatgataggtctccatgctgaaggtaaaggctcttctgaaagccccttaccttctagctcctcagaggagactactctgatgggccagggcctcctcatcactgactgaaagttagcagagctggtcccctggaaagggcagatagggatgtcccccacctttctcccaattttttttttttttttctgagcaacactgctctgtataattctttccattctaaattgtctaaggtctgggctgaagaaatagctcagtagttaagagcacctactgctcttgcagggtaccttggttcagtttccagcacccacaccaagtggctcacaaacatctgtataactaactcccttttccaagagattagacacatctggctcctgttggtacctgaagtcaagtgcacatacccacaggcagacacacacctaaacataaataaaaaacaaaatgtctatcaccccaggttagcctctgggccatttgtcccgtgcctatccagcagctcccacttgtcacagactcctagaaacattcagtcacttccacaaagagggaggctccaaaacatgtctaaacttcactgaagacaaaacacagcactgtctgcatttcaaagcctcatcattaattttgtatggtataagctcccacggttttgttttaatctatttaaataatgtctttactttttcaaaggactcaatctggtctcagggatgaatcccactctccagttcattgtagtgatcattctcaatctcattttaacaataaattcagggtgggtggtggcagcacatgcctttgagccgagcactatggaggaagaagcaggcaaaccccttagttgagaccagcctggtctacagagtgagttccaggacagccagggttacacagagaaaccctgtctccaacaactagtaataaataataaaaataaatgcaggggcctgacctcactaacgcaggtgtttaggcacaaatagaaatgaatgtccagtgagaccctaggggaaaaactgttttggaccccattctcttcaatattaatgttaatctaacacttgccagaggctgcttgaggccaagacaagacaaatactcacacttggccttaatgcaccaaaactagtattgaaattctaggagccttccagggaaagcgaggaccgtcccaggcctctgcctgggactgcttcagtagtggagttggcggctaagaaaagaacagaggccgggccgctccaccaagcccctctaccctttaattcctatgagcggcatcttaggcatagatttaaaacaataaaaataaaacactgtaaattacacagccaaaacctcaggaactcaaatggacggagaacggaacgctcacagaaagatagctgcaagccacaggctttaacatttcccactgaaaactgcagtcactagaagattccaggataagctgagtgtcacatgctagtgaaggcagcaggccttttgtttcctggcaatgtgcctccaaatctcccaatttcctccaaaggctttggtcaaacaagcccatctcagagggtgggcacatgctcttttatagacaaaatgatggatgagatgacctttcaaggtcatttccaaactccaaggtctattcttttcgaaccaacaactactgccacccagtgctctgagtttaggcctaggcctatgactaacttccaacaaagtggggcggcctcggagccaggattacccaagaccactgctggaaggatcactctttccctttataacatcagtggagtcccccccccccttcctttttgcctctccttttttgtgtgtgttgcatagaaacagaaagtgcctttgtaccaattactaggcattaatttacgctcctccgtgggcgctgggcttgctggagaaatactagggaagagtgggagggtgatgtgggggaggtttctagctgtaagctttccccccaaccctgagaatagataaggcaagagagaaaataaaaaccagactgagaaacacaacaggcccgggtgttgtttttcaataccaacaatgctaatgatcagaagacatgcagaaaccaggctgaaagcaggttccaagcagagccagccctgtggttttaggggctgctgaaagagcgctcgggactcatctgcccactttccctctcaatgaacttattagggaagatcgctgccagccactttcccaatatgtcctatgatgtttctccctgggaagttcactttgggagtttcccacagacctgcagaatgactggttcttggggtaagcatcaacaattgtaacaggaatggagtccttagagagtccacttgcctcctgttagagcattgtgtctgaaggcaatggggtgctaccatccagagggccctgtttcctctggtgcctccctcctccaaccctgggggcactcacactcctctgagagggaaaccaaggaaacacccacgtgctttgtaattgtgccccattagcatttcatgctgtgaagcagcgagccttgccagcttcagaagaagcttgggaggccaccctgcttttgtcagtgctagggcaaagagacgggcaagtaagagatggaggaggattccttcatttaactgatccttgaagaagtcttccagactagaaacaagagtctccatggtgggtctccatcttaaggggagatttcaactaggccacataaccaaaggccaccctgtcctggactcaagagaagagcaccttttctggaattcactagtaaacctacaagaacccaacaaagtcaggaatccatcttcccaggggaaagctaccggtggccctgcaatcgcttctctacagttcattgctatttctccacacagggcacttgaaactgggtctagacattctcactggggtgggtgggtgaatgtcattctcaggtgggtaaaaattggctctttgatggaaacaatcttaggtatccgaatgttttgtggtcttctaaaggggcacagtctctaggtagctctataattaatcctctcagtgttaagacaccactggatacaggtgggcatttgcagaataatatcgtctggagtcttcttaggggatatacaatgggaaaacagtagagaaatattctcataggcaagtcacctcctcaccactcagtcggggttagttttaaatacatccaggaaggatgaagtttatgaaatactatccgtatcactgtgagtagatgcctagaaagaacagggacagagagcacacctccttaaggaccaaagcacagggtttccttgtcctcatacaaagaggagaaaatggagccgggcgttggtggcttttaatcccagcactcggggaggcagaggcaggtggatctctgttagtttaaggccagccatggacagagcaagttccaggatagactccaaagctatacagagaaaccctgtctcaaaaagccaaaaaagaggagaaagtgataaggaccaggtgacaacacttcagccactaaggcctcacagtctagggtgtggtgccacagccagagctgactccggccctgaaatccagactccctgggcttttctttgggtgctaagaactgaacccgtggccttgaacatgctaagcctgcactctgccagtgagcacctccagcccctgtaaatgacttcacatttgtttgtttgagacagggtgacactatgtagccctggctggcctggaacttctatgccgaccaggctggcctcgaacttatctgcctctgtctcctaagagctagaattaaaggcgtgtgctaccacacccagccatatcacacttagaacaacactagactcaaacaggtaactccaaagctgcagaagagtgaaagagccactgagtacaaacttttccacctgagttagaactggccagaaaaggcattcctaaggagaccaaacattctattccaaaattggaggtaggcttctgttatggatgccatgccagttccttctgccagacaccgagcatccaaggaaaaagtgtaagtctggtggtgtacatgcctgtaacctcaacatgtgggaggtgaagggcggaggtggtcaggaacatatcaaattcaaatccagcttagctatttcagcaagaccttatctccaaaaacccaaaataaaaataaacgaggtccacccgatataaagcagttccaaccaactgttgctaggcaaggatccgggcccactcactatttgccagatcttctgatttttccagagaactagaaatctggccttatgccagaatcttgatttttagatgctgataagtaatgaaatttttataaactctgtgccgtccacagcaaacaaatctgcaaagcaaaatctgcagcagcctactccggttttcaaaccttaaattacgaagatctgcctagggtctcggaatatccgagcctagttcagccacctcaactgtgtccttcctcgggacaccatggaaggagccccgctgaattaaatttttgaaatgattcatcttccaaagatgttggcgtatggcagcagagctgttccagggctctataaggaagtgagcaagcaggggggattctccggggaatgagtggagggagccgtactgaacacgggggtgtggcagggacttcagctcttaagattttcacagaacactgacggcccaaggctgtctctccatgcaccttcaggatttaagaaccagcagaaagaaaaccaggaagctccttgccccacccaaccgtgatctaacctgaagctgcctgagaatccaagcgcctgaaactcaacttggcatgtgtgccctcgtcagtacactctaggcaggatctgtggaggctagagttttcatccacactagcaggacagggagtccttcacctctaccccacacccccaaccccccaaaacataaataagacccctgcaatcaccacaccactagaaccaaaagaacactgtagcatttaaaacggaaagagtatttgcttcacttccttttccactgtgatctgtgtaaaagcttctcctgaaacagctgagctgacgtgccttatggagaattaaggagcagcatgcatgcccgcacacatgagcatccatttctataaatgcccgagaaaagcactcagccgaaatggcccagaatgctgggtatctactgctgagctgggaggcactgccggcctccccacttacaccactgggcagccttcctgaaggagaaaatgcctttgctcaaggtggcagtgggtgtccatgtgagccactgaaccctgggaacatggctgacatggccaggcccgcccaacagctgtggtgagtaacacgctgagttaatataccactcttcgcctcccagagccctactaaaggtcacacccctcactgagggtacaggcctaactgccttacagattcaaactttcaaaggtgctgcttcatatggcaacctggatgtggatccccaaaagcacctgttttttcattagcactaggaaatttagatttatatgggtgctggaagccacctccaagagacttcactttccaaaggaaataaaaagggaggtggttacatactccttcttttaaaaggcaaacaaagccgaaaaaccccagcgagagtaccattttgaaaccaaaggttcaggatttcttctacaaagttcccacaccaaaacgcctctacgcctttccatacaaatgccaacaatttcgaaaacatgctgtctcagggcagaagggacaggcctgctgcctgatcatagcagcagtcacaagcgacccttcccaagccgatcagacagcaagcccatatgtgaacgctttccaacgtttcccgtacatgtttaattagaacaaccagagccagttgaccaaggtccttagtccctaaagcccattccacacagcagatgtctttacagccacgttggtgtgtgctgcttggcctacagctagcagaagcgcctcacattcatcccccaaggccttgaattccagcaaggaccacacctctctacttagggttcaggcgtgctacctaataagttacacgggaacagatcagcactaaatcacctcccttaggaaggctaacttagtcaagaagttaatccaccaaccactcctcccttcatcagtctcccctgcagcctgaagcagttttattttaaacctctcaggggactcttggccaaatttaaaaccaccttggcaagccctgaaaagtagccgccatccagctaaatgagtccttagtcatccctaaaaggattcacgcatgtggctttcccccatgccgcgacccctccgctgcaaccccaccagggaaattgaataaaagctgcgccatctgactgcccgccgccagcgtctccccaggtggggcggccccgcagcagccgggtgcggagtcccgggggcggggcggggaagggaggggcgggcccgttccccaccaagccacgcaaaccactctttcaacccggtagtttggggctccgggtggctcctaaaggttggggccaagtaaggagagagtgcaagagttaaacagcatcgtctccgaaatatttgcagcctctaggccgagtgcggagtcctgggcacccaggaatgctggccggccaaaggttagctaagcccggagaggggggagaggcgacgccgctaacctgtatgcactctgtaatgggctttaagatgggaggattttccatagactttcccacagccactgtaggggcacttgtgcctcttttcggaggcgtgtttccccttcgcagccactccagagtggaggagggagagcgggctgggcgtgttgccagaatcctgtctctcctccgggctgtgggaaggactcgacccagattcggtggtcacgtcgctgtcggatcctatatcctcatcgggactctccagactgtcgctgcacaccgagggggtctggatgggtcggtacttgttcaggtccaacaagctcttggcgatggtgaccagcgtgcaataatccttccaggtgtcccccgggtcaccgtgctccttggtcacctcgcgctcaggtagtcgcagccgctcggcgtccggagcgcccccatgctccggcaccgcggtgcggttggagatggaaaccagacactgggcagccacgaagtccatgtaggcggccgcggacatggtgcgggcgacggccccccgggcggtgcggccaaacttgacggtggctgcggagcttcggctcgccctgccctggcctcggacgacgagcgcggtgcggcgaggccgagggggcgggggcgcgggagcttgcgactcgcgggagcgccgaggcgacctcagcccctcatctttacgtaaccggctgcgcctccgcacgcagcagccgcggccggctccgccgctgtcgccgccgccctgcccggcgccccgcgcgatcccccgacgggcgcgccctcctcctgagccgcctccttggagagatgccacacgtggcggtcgcaagtttattcgactgcaaacgcgtccgagtcgaggggacaggcaactgcgagccaggcgcacgccctcggccgcctctccgccgagctcacgccctggggcatcagccgagtacacggacgcggggggcgggggccgagcggggcgccgcgcctacaagacacttcttcccgcgtccgccgacggccaccgagcccctggtcctgccgcgccgcgccgctccggcattctccagctcagtaacaatttcgcagaatcccatcacgtcacaatccaggccccctccaattggccagtggggagggtgattcaactctgtttactttctccccctgccagtcagaagggcccttcggtggagaggtgcgtctagaactacagcgcgcggccaatccgaccgttccgttccgccgccgcgtgctgcccctccagccccgaacgctgacatttaaaagggaaactgttcggagccgggtggcgcatccccgccgatgccgcccggtccgcgcgcgcgcccacgcctcccggcccacgtgccagctggcgtggcttggagacgtatctcccccaggcggttacacccgtccctagggccgaaacagaacttcagcttcgggtttccagccttcaaatagttaagtgacttcctgcaaacgctacagtcccagcaaccagccttccaatcaaaagtaagttggttgatgtcactggcattgcctcagccaatcagaagggcgttccgaaagcaagcgctcgacacttgtaaacctgcggagctgtagtgaaaccggacagatctttacattttgtgttgctggtggtaaccctgaaatataggtgggaggacggggtgattaataaatgcagtgtgaattttaaacaaaccctcaatatggcaggtcacactatccaaggacaaactctgaggagacagcatcgattggttcttgtttggattgcagcactttggtttaaagttcttccaccccacatatactatgagaaattcatcgcaaaaattcacagctaacaaaacatctggttccagaatcttgcacagatccactatatcttggtatttgctataggtgttcctactgccccaagtgctaccttaaaccaagaaaaaccagcacaaaccctcatttgcataactttaaaaactcttttcttttcagggactcctgcggggcacatttcctcccctttgctttgcaaatgttggagaacaagacttttctaccttatcaggtagataataggactcaatagaaaccacagggttcctgattcccaagtctgctttagagaaacaagcccctgtgaaatattaactaattaaaaagattcttaaaaactggaatcaaccagaaatccttaccaagtgactcttgtggtattacttgatcaacaattagtgtgggtttctcatgaatgctagggttgttttccatcttgatagctgagcaaagaatctagggccaataaccctagcaggggcatatggtcaagggcactgctgattcaaaatccataaaaaatccatccacttatcctgagtatgaaaggctcttgtttccatgagatgctaatttcacaatatctaaccctgccacccactagtgattaacctttaatgtttgggatgcttccacagggttcttctggctctcagatggatccttctagtttgaagggtagaatagatcattttgaccttgaaagttatacaggatagacaccacacaaggtcattccctgggaaaggaacttgtagaaagtagggctgacctgtggagaattaccgccatgagccatgatcaatcatatccgtatccaacgccagagagcatggagacctgctctgtgccaagcctaggcccaaacaccctcatggacccttgtagtaattatgtgaggtaagtacaagtatagcacactatgtaacagggaagccatcttgcaatttttttttttattctaaaaaccttaatttcaggaaggaattcacagaagttggccatggtggtatatactaagttccagacttaggaggatggagcatctgaggaggccagcctgggtatagcctgggctacagagtgagagcctgtctcaaaaagaaagagggaaaggaaaagaaggaaggaagggaaggagggattgattctgcccaattcatgatcattttttctagactcaactctgtccctaggatacatggttagaatttgcatgtctgcctgccccctgaggcacagcacagataaccagtggatctctccaggagcccctgtgatcaaggcctcccagacctgtgtttccactagcatgagtttctgacctaggtctgacaggttaccaaaactttaaggttaaaatcagtattgtcctcagaaagaaaaaaaaataaaataaagccttcgtctttccttaaagattgattctgaatttgaatacagtaaccttgggtttttttttttttttttttttctatatgtaaacttaacttcccttacttcttgtggccttctctttggtgctctttaatttcatgtggtttggactgagttctttgatacccttgattccgttacaaagaagatcaagaaggcagattccattgtgtgaatttctcttacagatttgcaaacaaattgccacttgatttagagaatggtctcaaatccagcaattctagcagtgtgcaccgtcctctcctttcccaaccattcattctcagacagttttgttcttagcagcaagatagacatgaggacagaaatgcaaagggagtctgtcctagatgagcgctacatgttaaaaaacatacatgtgagccgggcattggtggcacacgcctttaatcccagcactgggcaagcagaggcaggcggatctctgagttcgaggccagcctggtctccagagcgagtgccaggataggctccaaagctacacagagaaaccctgtctcgaaaaaccaaaataataataataataataataataataataataaaaataaaaatacatgtgtttgatgacatacagcacaagagatagtaattcctacatcatgatttccccttgtatttttcaacaatattttccttgatgtgttggaatgtactataatagttttatgaataaaaccagctcatattatttagccagcatgtggttgtctcaattaaattttgggaattacaccattaatattatgccacaaaaataaaagaggtctcctttcccaagttagtctttattacatttctactccaaatacccccacccagaggaacactagaattcgaagattgtaattgcttttagtttatattgtttacctctccacattctccctaagtgtatgttttattatctaagttttcaaggctatggcacatgatcaggtggccagaacaataagcctggtttgccaatggcttcctaaaataattatcattatgttatctagtataaggtagtgcttgaaggctataggcctcttgggcctaagatgggatctgtgacctcacccaacctccctgagccattttcttatctgcagactgataggattagattaatacagttgcacagactctttcaaactcattcgatgcaggagtctttaaaaattccaaaaggacaggttggagtgtggaaggacacacctgtgggttgcaggcctgactaggctgcaggaaactcaaaaatcctggggcaggggccactagagtaagatgtgctctctcagaacattacctcgtctgcttacagcacatgtcatggcagtgtgggttggagaaacttaagtccggtatttaatgagaagacttttttttttttcaaaattattctttttaaaagcaggttctaggctagcctccagctctagcacctccccaaagcaagagataacataccttttttcctaatttcataacctcctctccacccacttctctcattggtctgtaagaagtggcctggaggcttagaatctgttctttttcttaggtaagccccagtaaggtatttccaggctaatgctgctgattcctccctggagatttatttagatccgaagccgggcttccccatcttggtgggtggggctaatcgcttggcactcagtttaaatcacagatggccaggtatcgtccctgttctaggaccgaagttcagcctaaagtcacacgctgtagatgcagggttctgccgattctggcttttagcagtcttttcctgctgagaggcgtggactgtgcctggacagggtttgccagcctcccggcgggaaggaagaagaacagatggcccgctgggggtaggggatcacgtgtcagacctcacattgggcaggatccacacccctccctttcccggcctgggctcttctgctttggcgatcccacccagtgcacataaagggcctactgggaaaagctgtgttcgttttagtgaaaagggaattggggaaggtggtgggcttagggggtacatacataggactgaaggggtgggctctccactacagtgatgtgcctggaactgaaacccaatccgataaagccggatctggcgaaacgactgtggccaggttaacacccagtgtctagagggggcggggagctccggcaagcgcgaaaacttacacgacgccctactttactctcgctccactaagcagcctaccgcaaactccaggcctctccattgcagagcggaaaggccatccgttcatgcatatgcaggaggataagtttagcccgcagcccccagtgctcagagcggcctggcgtggcgctcggaggcgggtgctctgctcgggccgcagagtggcgggtggttcagccacttgcgcgccgagcgtctgggactggcatcgcccttttaaaaagtcttccgcaggcagccgccgcagcagcagccggaggaggcaggttcatctgaggacagtcccagttctcagaaatcccttccctgctggaacatcaagctccctttgctgcagttgaacaaactgccctagattgggggacgaggaacccgccccaaactcgtgcaaggagcttcgggcgcccgcgcccacgtgagctaaccttgaaattagcccccacacctgagctgggggtggagcgactcgggagggttgctagcccctcggggctctagccactgggtttgcaccctccacgtgcgcgcaccgccctgtttcgtaactctagagatttttttttttttttaaatctctggggtaccatgggtgtgaggtgtgctgagaaggcaggccaccttccacccccacgtcctcgaagatcaggaaaacctgccctgcggtacccctgggaacactgcagagtagggtgtcacaatgacatcagcctctaaacatagtccgcaccgcaccccaactctgggcgccgcgagcaggggatgggggtggggtggctggtgctgctgtccccgagcggggcggggcgggctaaccgaccggccggccggcctggctgtgcggtgaagatgactttgcaggaatcgtgctctcggcgactgcaggcacaatctctcccgcgatgacccggccatgcggctaaaaatcagtaatgtctttccgctccctcctctgccccacaaaaggtacgcacacacgcgtgagacctttcgacccagtgtgccttttatttatcagacattctcagcaggggtcctcggtttcggtccggcaccccaacctcccccccccccgctccggcccccgcccggggctccggtactgcctcagggctaggcttgctctggggtcggcgcggccctcagggtgagtcagaagggctgtgtttcctgtggttgttgtggaacagtttgtcctttttacccccctcccacccgtctccacccccttggtaaatatagcgctcacgtttcatcatctctttgtccaacaagcgccagacaccccggcccgcggcccacgccgcctccctcctcctccaggctcggttacctcgcttaaccccgcgcactggcggcagcagcagccgcccctcagtacggcgccgctccccggcgcttcccaccacaggacactcccgcccctctctcatcacctcccctgcttccaagtccggtccccccctctagaccctggtcccacccattctcccggatgacccatagatgttgggaggtagacatcccacgccctggccgctgggtcctccatcccctcccgtcgcaagtcccgtgtcccaaggatgatgccatgctcccctcccgagtaagcgcagatgacaggcggctgagacagttctgattcaccgacagttgctcgtacttagggggtgggtgcttggcgaactgtcttcctcccacttcctaccacccctaccccagtagggacgtgggctgcagggtcgggaaggcgaggtgagtggatgacaggcaaaaagtgtgtgcttgttcttcgctctgcctcccactccctgtttcatttccacacatacagccacccaccgggaccggaggcggctggtgttctctgaacaccgggaactggctctctccgtggtctcctgtttacttccctcctcctctctccccttcccttcccccatcaccggggctgcctccctcctgcctagagcagctgggaaacctgccgcaaaacactgcagtcatgggactttctttgccatgtgcccctagtttgccctgtcctgccctgcgactgctgggggcgcgtcttggaaaggatggcacttgaggctccttatccagccgctctctccttccctcctgtctcctctaccctcctctgccccaccccataccttcctgcaaaggcagggcctggcagcctttttggctgggattctgggccacccccatgagcggccacctgtctggggagaggtggtgagacagctgacagatcctcagaactgtacacccaggaggcaagagagctggcttcttggccaccgcagactgtcctgtttatgccagctgccccaactttccccagtgtcccccaaaatctattcccaggacacacctagagagaggcaaaccctcccctttcagacttgcttccctgcaggaaggaattcagcctttcctaatagttaagctgaatgaacaaagggccccaaggaggacaagaggtcccagctctgtatgctgcctgcctgaggttcaccccattttaaaaaccacctcttcgccaccctctccttactgccatggttaccaaccgccctgtccttgagcagcactggttgtataaaggcagaagcaaacaagggcattttaagtgttcttttaaatatccaaaacactgggttggtatttgggaagcagagaaaaggaaataaaaggtttggctgttgcctgtttccttctgactccaggaccctgaataaatcttttaccctggatggcctcttagcctcaaagagaggatgaggtttactaagcctccagagtggaattcagaacctatgtcagcatcacatcagcgcctcagtgttgttccccaggttggtctgtctctccacaccgcctgcagctttttaccttgtccccagactatgctagccctgccttgtgcctttctgctgactttattctccttcatgctccaagagtcccacacacttgactcacagctctccacccccaccccaccactgtgaacactgctaatgaacttagcattctggtaggtagatggtcccatctgagaccctagtgcctgaaccaccccattgtgtgggtaccctagacctttgcaacaccagatatcatagtcatttcagaattcttgtcctgcaccctacttcccaaccaacacttctttctctcctagtttatttgctccaataaccatatttgaacaattctttggctcagttttggcctccaatctccttttccgttgttcaaccttgtccttacagccatggtttgtatgcatgcccccctcacctggttcctgggacctcttggcaaacacagtttccctccaacttgccatgctgaattaacataccaacagctacactgttgctactctaaatttatggtcatgagtctctagtgggctcttaacactgtccttttgcatatccctagggactttcccacgctctgaaatcactatattgcactttctgtcctcagacaccctcctcattccacactctgagccaaaagccctgctgtttatttcactgaggaaataaaggcaatttgacaaaaggcttcaccttccgcctagtgcaccctccatgttctttgtctttctgtgcaggtgctgcccacacttctgtcccttggatacccattcatacctcacccacagcgccagggtgcctccccaggatgcctccctgttgtctagtgctatggggaggatgttgtttgaatggccccacggcttcacgtgttgaaatttaatccctattgtgagattggaaacgaataggccaggatagctaaaccggtagatcacgagagtatcatttaatctgggagtccaaggttcatgtccctgttcagtgattctttgtgcttgtacctgctgtacaagcaagaagacaatagtttagattcccagaagccatgtaaatgcatggtgggcggggcaagctgctcataatttctgacatccacctcaggcttccacatgcatgtacacttatgtgcccccccacacacatacacacgtgaacatgtatacacacaaaagcacacatgaagaaagaaaaactgttgctaccagggagccccctgttgctcatttgtccctcccaagaggaaatgtaaacaatgtctaactcttctaataagatcccagcaaaaatgcaaggtggattcctacctaaattcactctggataaacaatgattgtactaggcttccttacagagcacaagtaagtggatacttacagggttgtgggctctcatccccctccaataggccaccccaggaaagcctttactccccagtgatgagagcttcccagtagtcttatagattgagcttctctctacaagttttctctggtctatatacttgaccccctccccttccttacatgtgaataaaaagtgctagatcctcatgtgagggtctcccagtcctccctgcctctctgtgtcaggctgtaagcagtcaataaagcacggtggaataatccttttggcagggggaatatagctgagctccccaggagggcagttgctaggctcaaaggatagtcaggcaaccctcccaggagtgaatcctggagctttacaagcaggtgagaggcatccttgtctcttgccagctgatgttctatgccttcaagactatctttaccctcctaggccttgtatctccagaaccctgagccaaactatacctttctttttttttctttttttttttttcctttttggtttttcgagacagggtttctctgtggctttggaggttgtcctggaactagctcttgtagaccaggctacagagatccacctggctctgcctccagagtgctgggattaaaacgtgcgccattactgcctggctatacctttctttgtgaagcagtctgccttgttttgttatagtagtaaaaaacagattaaaaaaaaaaacaacttttagcgttattattattattgtgtatatgtatattgtgtatagatgagtgtgggttcattcgatccgtgtgtgtgtgtgtgtgtgtgtgtgtgtgagagagagagagagagagagagagacagagacagagacagagacagagagacagagaggagaggactttcccaagaagggtttataggcaagcactcataccagagccatctattaatagcttctggacttagccccacctcctgctcatcatcagaatcattcactttagtgtaaaaatgtgttttctttgagcacacagactcttaaaaccaatagaaagtctttatttgcctgccagtgggctacacgggaacttgcccaaattatgtagctacttgcttaccgttcttggctttttaatgcacaaaaatcatatcctggttgacacacttcaattagaaagaacagttagcaataagcagagctatagaagtcaaaaagcaaggttagtacccttacggacttttccagaaccgtggcattaggtctgtgttcttgttttttggcaggtgttggggtctatgtgctgggctttaagtcagaattttgcctcagtgcatataatatggtatcagtttgctaaggactaaagacttgttacatattctcctgtctctgtacatgaatgtacatacatgtgcatgagtgttcttcaaggactccatactcctctgtaatctttacttactgtttttacctggctgcacataccctgagttggttgcacactcctcctattctctctccatctgacaccagtcacactttaaccttgtcactagaccggaactactcttgtcgagatcacaaatgactttcatcctgaaaaatctcaggaagttatttcaaagcacagaagacatggaagaggcagtgaaaaaaaaaaaaaaaaaaaaaaaaaaaaaaaaaaaaaaaaaaaacagactactagaagccaaggcaaagagaggccagttcctcagctgtctcctccagtaccctccattggcctctgtttttaaaacgtttatttagaagagactagagagatggctgtgcaggtaagaacacttgctgttcttccagaggacctttgattcccagcacacatggtatctcacaactgtaaatccagtttcagccatcttggggcacctggtgcaaatttgatgcacagacatccatgcagcaaaacacccatacacataacattgaaacaaacaaacaaaaaacaaaaacaaaataaaacaaaaaaaaaaaacaagaggccaggcatgcctttaatcctagcacagggggaggcagaggcaggtgaatctctgagattgaggccagtctggtctatgtagcagtaggccagctacgtagtaggccagccagggatatatagtgagatcctgtctcatagggatggatgggtggatgaatggatggatggagggatggatggatggatggatggatggatggattgatgagtaaatatttcacatcacagtgtctgtggagataagagttccctccttccattttgtgggttctaggaatcgaactcagtttggcaggcttgtatgcaaatgattttacctgcttagtcatttctccagctctcttctctcttacagccgagtgactccagagctttgtcctcatctttcctaccccattggagacttcataggcccttaagacttcacaccttctgttcagtgttccctgtattatttggtggcttgcatcaaaagctgatgtgacagatgttcatttagagacagcctcactgtgtagctctggctggggtagaactcacagtaacttccctgtctcagcttctggaatgctggagttacatgtgtgcatcatgatgcctggctatccctgcctttatgccccacagaaacttctattagtcaaatcccccccccccatgtctccacaacctgacccttcccatcacctctaccatgccaccttatctcttgatgcaatcactgtgctgggctcccagcaggcctccttgactccacctggtcctgatctctcttctcacacaactcccagagactccttaaaatacaacaggttacaggacatctctttgtaaatcccatcctgtcctacagagcacctgctgcagtctgcacagtgagaacaaccccctacagtgtagggcctggactttctgagcccttcttctactctgttgctcttccttacaccactccagccactctgtccactttacatgggagctaaccaactgctctcctgccttggaaaccttcacagaggcgtggtccattttcctggaaccccattctctaagatcctacatggcttccctctcgctgacccctacccccaccctgcaactccatgttctttttgatattcgttcattcagtcatttgttcattgattgatttgttcattcattattggctagtttgagacagggtctcaggttggcctcaaattctctatatggccaaggctagccctgaacttatgatttccctgcctctgcctcccaaatgctgtgattatagacatgcaaaccatgcccagctttccttcactcttttcaaatggctcttctgagagaaaactgcactggccagctttgcaaaccctgccgcttcccattgcccctggctccgttttacattttcttttccaaagaaaacatttgttgtctttttttttttttttcctccttggctttgtttactcattccatattaattgttaattctgggtctctctcttgctggaatacaagctattttgttcattgatatattcttcattcctacaacaatgcctggaagataatacattcccagtgaacattgccaaagccaaatacagaggataaagccctgtaacatttgaactcttatatttcccagacactgataaaatatgcactctgtgatttggacactccatgttttttgatgaggaaattaaggtacaaaaccaaggtcacacggggcaaagctgggatctgctctcaggaccctgcttcaagaactatgtttttaagcactgctgcctgtgagtaaggcaaagaactgtaaacaagttcttcctgctgtggctgtagtcagctgctgaaacacacaatggcatttccagatgtcatctgtatgtgtgtgggagcagggtgtgtcatatgggccatttctcctactccagacagaaacgctgaagaaagagtgcccgccacgcagagtgaggacacagctgtgtgtttgtcttggctggagtacttgattcctcatgacgctgagcagatttgtgtacaggcgtcatagcatagtgggaaaagctcctggcctaaaagggcccacagacacagcacgatcataacacaatgtctcttttcatctgcatactgcactattctagcctcaatgtcacctattcccctccccctctttccaccctgccattacagtattgttttcctcctgggccagttcctgacactgggaaatgccgaccagggacagtggtataatgtgccttcgtgttcattcttgtcatgataaagaggaagacacctatggcttatgcaagtctttcctttggctaacttaagttactttcatgaacctgtaacatggccaggggatatttggtgaagatagccttggcattctagaaattcagcagccctttctagaaggatttggaaaatgtataaaaaaaaaaaaagttaatgagtagcaacgtggcaaacctttcattggctgggaattgcatagcaaggaaagaagacacaatgactacaatgctcaaaactgtttcgctggcccctttgagaagcactgcaaagtaggacatattggctcatacctgttgccccagtgattgggaggcagaagcaggaggattgccaattcaagagcaacctgggctgctgcccaagaccctgtcttaaaaaaaaaaatggaaggaaggaacaaaggaaggaaggaaggaaggaaggaaggaaggaaggaaggaaggaagaaaaaagaagggggtagggcgagagggaagaacaggagagaaaaagtgggtggaaccttggacttattagattatacttttggatttagaagtggatttcttcactatgatcacaatgaggtgtgtggcatttggaaggaaggataaagcaggagttggacagacatctagtgttccctctgcagggtacctccgcctgctttatccacccctcttctgctggccttcagagatgaacttgagtcagagtttctcaccaaatatggagctcactgttttggctagaccgactttccagttagcttctgggatccgggagtcttctcatcccctccctcagcacctgggttacaggtgcataccgccacacctggcttctggctgtttactggatgctgatgatttgaacaggagtcctcatactccccagaaagtagttctctgtttgagttcttgtcccatgcccacagcagtcctcttcttgtgctgagatagctctcactaagtagagcaggctggcttggactttgctgtgtagtccatgcagaccttgaactctcaagcctcctcccttcagcctgcttagtagctgagatcctaggcccacctgccaggccctgatctttctcagttttaactatttaattctttttttatttattactgttgtgtgtctacatgatgggcacatttggaggtcagaaggcaactgtgtggagttggttctttctttccacctttatgtgagtgccaaggatggagctaagatcagcagacaagtgtctttatctgctaagcaatcttgctggcctccctgttgagacagggtttccttatatagctattatatttaatacaataggcctcagacttgtggcagtcctcctattttagcctgcctagtatttggttaaggtgtgtgtaccaggccctgtttctttccagtcatttttggtttggggggcagggtttctttgtgtagccctggctgtcatggaactcactctgtagaccaggctggcctcaaactcagagatccacctgcctctgcctcctgagtgctaagactaaaggtgtgcaccaccatgtcttgcctttccagtcttaatatgagaaattctatgcattggaagctactgtatgttctttctggagaggtgcaatacactgcgtggacatgttctaaggtcaagccagttagcccttatcagttgggttctaccactcatttctttgacgttaggaaaattatatccttttagaatttcatggatttgggggttgttttttgagatggggcctcatacagtccaggctagcctagaactaactatatagctaagaatgaccttgactttcagaccttcttgcctccacctcctgaacgctgggattcctgccatacaacaccacactggttttattcgtatgcatttttttttaaagacagtctcactgtatagactgagctggccttgtatttttggaatttcttctgtatcatgatgacagggtttatagacattagtcgctacacatggttcttaaaagttcatctacaaaggggtaaaaatagtacctcttcacagaattgatacaagtacacaacatgctataaatgacatgggattcagcagaggacatggtgttgggcaagttccaccttggtgtttgcaatagaaaccaacctggagacagataggtagcttctccgcagaagacccgatcccggggaagggaggagagcaagtattggggagcacagttgagatcccttttataggaaagcctcttacaatgatccattccaagaatgggaagcagagattcttatcccccaacactacattctcactgaagagagagtctcctccaggaagattaacctctccatttctgggctcctcaactttgagaaaagctctggggcagagagtattcaggaatcagccagaaatttgccctccgcagaaatgtttggtgcagctgaggttagaggtgggtcatgagtacgtgaggaagagcactggaagcacctattgaaagggctcaatctgtgttagccattgttattagattagatgactcaccccagtacacctcatccttcctgaatgagaggctcacctggggagcttgttaaaatgaaaattttggttcagtaggtttggggtgggccagagtgctacattttaatgagctcccgagtggtgctaatgctaatagcaagattttatttaattgatacatacttatcaagcccctcctctgtctgaattactgtggtaaagactgcagcattttgtttctggtatgctgcatagtagtctccctaaaatgtccacgtctggatcctcagcctttgaatatgtgaccatagcaaaaggagttttcagatgttggctcagttgagaaccttgagatagaacgcttatcttggcttaacggagtaggcgtgatatgctttcaggcttctaggagaaggagagcagaggttggggtgatgatgccacacctagctctcaagacagaggagaggaacacaggcagcttccagatgctggaaagttaaggggacattttcctgaagagcctctgatggacacacctctacatcagatgctgagatattttttgatttttagttcactaaagctttgtcccagcagccacagaaactaatatacaaatgagaacaacctgagacctggattagtcaggatatgttaggtgaagaagctgtaataatgtatgagtccctaatgttagttgcttaagtttaaaaaaaattatgtgtttattgtttagaatacattctaaacaaagatgggttgatgtgtctgtcgattcagagcctgggtcgatggaagagccaccatctggaacattgaaagcagaacttccattcacatctcatatgttgccatcccacccttaaggggaatagaaagcacgattcatccacatacgcagaaggcagaaagatggaaatagctgttggccctatatctagtatagctgactaagctcctgctatatattcatctagatacaagaacagaataaactatgtactcagtatgaaaaataaaaataaacttgccgtgtggtacatgtctgtagtcttagcactaaggaggctgaggcaggaggattaccagtttgaagccagccacaagcaaaacaaagaaatttatatagctctatgaaacaaaactctaagctgggcgttggtggcgcacacctttaatcccagcccttgggaggtagaggcaggcatatctctgtgagttcaaggccagcctggtctacagaaagagtgccaggattgtagtatgtatagatgatattttactttgtagcccctccttggaagttagccggactgacacttccaccctcctaaatttcctgtctagcaggggttacagagtctcaccttctaaggttcaattgtctaccactcaggttacctatttgggactaaccattaccccaacccacaaagctattactgtagacagaaaaaacttaatcgggtctcttgcagttccttctactaaagaggagattttatcatttctgggaatagctggcttcttacgtacctggatcccctcttactccctccttgcccgccccctttatgaggcagctctcggacctccccatgaacccctccttaaccctgttactaagccctttcagagacttaaacaggctctcctaaaagcccctgctcttcacctaccagatttaactcgtcctttctccctctatgtaacagaaaaagaaggatttgcccttggagttctaggtcaccagctaggaccttcctttgcacctgtagcttatctgtcgaagaagctagacctaaccacccaaggatgggcatcctgcatacgtgctttagcagctgctgagcttcttatccgtgagtcaaagaaactaacctttgggtcacccatcactgtcttctctcatcacaacctgtcccttctcctaacctacagaggcttacaaactctacctccttcccgagttctttccctccaggtggcattaatagaagatgccacacttactttccaatcttgcccaccccttaatatctcaaatcttctacctcaacctaatgctaactattctccaactcattcctgcattgaaaccttagaggaactattgccccacgttgggcgccaaatgttgttcttttgtttaagctgcagctgctaataaggaaaggaacaacgaataatcaacccacgtggagtttatttatcagggaggggggaaagaggggatgggcagtcagccaaccctagggaagccgagagaaaagggaagaggggtgtggggcaggaccttttaaagggaagattgcatatgcgcagtagggcaaaggtcgaaaggcatggcgggtgagtgagtacccgcttgttagggggcggggttagggtcatccaggtgttttgttcttacaaggataggctccaaagctacacagagaaaccctgtctggagggggggggaagcaaaaacaaacaaaaaaatccaaaactctagatgaaatagaaagcaaaacaactactttggccttgggaagacagtagaacaggcagtagaaggcagttgatcttttgaagaaggcaatgacaatgaagaagctcacattggtagagagaaagagggttttgattttaaaggtcacaccttcatttgtaagtccaataagttctgatatcaaggtagtgacaggtgtgttaattcacttgattggtgtagtcagccattgctatcatgttgcatatataatatttatttatttatttatttatttttgttttttctagacagggtttctctgtgtagctttggagcctgtcctggaacttgctctgtagaccaggttggccttgaactcacagagatctgcttgcctctgcctcctgagtgctgagttaaaggtgtgcaccactgcaaattttgacaaatctttatttgtcgaacaaatatttaaaaatttagggattcagggtgtagcttctttcttatagcagctttgagggtgatagtagattcctgtgatggttagtcatttgtcaacttgatacaaactggggccatctgggaagagggatcctcagttggaaagaaaaaaatgcctccatcacattgtccagtaaggaattacagggggcattttcttgattaatgactgatgtaggagggctcagcccactgtgggcagtgccaccactgggcagatgtttctttgaagcataagaagaaagagcaggctggtaagcatcatttctccatgcctctgctcaactcaaggttcctgccttgagttcctgctctgacctccctcagtgatagtgacctgggagttgtaataagaaataaattctccatcttcaagttgcttttggccatggcatatatcagagcaatagaaagcaaatgagggcagtaccaatctatgccacttaaagtggctacaatgtaaacaggatgtgtgcacacaaatagtctcatctttcttctttgcttttttcttcttcttcttcttcttcttcttcttcttcttcttcttcttcttcttcttcttcttcttctttcttcttcttcttcttcttcttgcctcccaagtgctgggattatagatccaagtcaccacatctgcccttattgtcttgagagtcagaggacaaagtttgggcacccttagctgatgaaaatctaagaaagaaattccagaagagtgagaactagagaagagaaactaggctgtggtggatacattacttacaatacccagaatagattttaaactcagcatgtagcgaaagagagaatcacaactcgctaccaccagaaaggacagtcatggatagaggttgaccagatggtggacactagagctaggacttctaaagcagctattatatgtaaaaatggaaagaaagaatctattcatgatgattgcataggaaacctcagcagagaaatacaaattcaaatggcaattctagaatttgaaaacatatgtgaagggcctagagatgtagatcagtggcagagtactttcagagaaggcacaaggtgctgggttcaatctccagcaccacacagacagaaagaagaaaagaaaggaaggagggagggagggaggagggaggagggaggagggaggagggagggagggagggagggaagagggagagagacatgaggccaccattgtaagggttaacaacagacagcgatgattaaccaagagtcaatgaacctgatgatagatgagttaaaattatgcccttagaggcacacagagaaaaaacatgttgaaagaagaaacaaaacaaaagaaagagcaagccttggggacttggtgggcaacattagaaaacttaacaattgtgctgtgtagtatcagaaagagagagggggggagacaggttgtgtttgaagacatatgccaagccttgatacctactgtcagctgcaggtaagaaatattaacacaatacctcctcttttctgtctaaataaaaagaaggataacttatcttttataataattgaagaaaactataaccataactatctgtctttaactctatcaaagaccatagaaagaaaatatataaactctagaattgacagagacatctggctacctggatagtcacccaagttcctctgtaacgttggggcatccatcttcagcccataggccacagtgtgtctagcacacttctccatttcaacaggaacccttcagtactgtcttgttttgtaagtttagcagtcactttcttgtgggtcctgcatgtccagtttatacagcaacaaacagtctaggcaagagcagtttcttacccaaatggctaatcttgtcgttgaaagcaaactccgtaacgagtttcttcgatatccatcctcctttctgatgtaattggtgtgccaggagcagttgtgtctcactgccaagaaaaccctaaaccatttaaatgccatatttctgtaggtctttgaaaggtttgaagaatacctaaccatctcaaatacatctctgtaaatctagaaaacctaactaacctaattataagttctgactattataggtgactatatcacctgtatttaattatgtatatcattttaaaagatctgtataaacacaaaacctaaacgagaggagacatatatatatcacaaaattgaccttaaagttgtatcaataaatgaaaatccataccaatggaaagtattcattcctatatcctattcccctttttttttctttaaaaagagattgactatgctcattatcatttataactaaccccatttaaatgaaaacaaacatttataaagaatatttggggatgtgggcgtcgttccttctaaactgcttcctgctgattaggggtgatgttcatataccatggggatcatgataaaacatagaaatctgaccaagtcgtttgtagtctgtaaggctgtatcgtctcagcttcagggggtcttgcttgatcaaaccatattagtctggaaggaatcaacagctttttcattttctgtggaagcatatgtaaaaactttttttccaagtagcctgtccttagacttaaattttgaagtcaaagcattttcaaaatgtataagttggattaatttagcagtatttataatcaaatgtattttagcagcagtaagtctttcctcagcaatcaaacaatttaaagacaacaatatggcatatagtatccagattctctgtgtgttttccatctttatgtggcttttttattactttatttttactttcttttgtttcttttttaccgagacagggtttctctgtggaaatcggcctgcctctgcttcctttagcaaattctatctgcatgtgccactacaaccgtctactctatttcctcctattatttttttctctcacaagcctacatatatttttaaatgcagtgtaaacctttagaggtttttctttatctggatctgcctttactgtaaatctttacctttttctggccaccagtcttttaactgttaaacaacactgccaagattaaagtggcggcattaaagtggcggctttcttagccgctgtcttcagttttttccacttttgctgagtcaggaaatctctcttaaagcaaccatttaagtctctgcttgtctctagcaaaacagagaccacccaagaaaacactgttaacaagaagtcatgcttgtctctgatcttttgctgctaaaatacctttttaagcttttgtaaagtttacatggaagttcgtaacactacctccagctgcccaggttctgccactgtttgactagtctccgggaggcaggaaggcaacttgcagcggtgagagctcagaaccctaaccctaggaccctcaagggctgcaggccatctcgggagtgccagagtccaaatcccaagagtgctgggaaggtgcaagcatatgggagctgctctgatgcctctcagcagcccgacagagcaggctgtggcagcaggtttccctctttctctgggaaccttggggcatggggtcatcccacttctgacaccattctgttgcgataaatctttccgccaaagccaccaagctccgccaccacatgggcggtctccgccagccgcccaagttctgcccgccacatggatggacaaaataatacagagacatattaggtacaaagctgcttggccaatgactaggattcttatctgttagctcagtcttaattatgatacatctatatattttataagccttctcttatagaggatgcctttcgctggcaccctctcttgccggtggctcacatcccactgctggaggaagtgaaggggaaaagggacatttcctgtttctcctttcttaaatatgagtctccttgctatgtcacttcctgcctggaataccacttctctactacatttcccagaatcctctttgactcctagtcctgcctaacttgctgcctcattggccaaatagtattttatttatcatccagtaagacaaacacacagaagcacttcccccatcacaatacagtaagattttacttatagatttttatgacatttatttattcattgattgattggggaacatgcattctatggcacctctgtagaggttagagaacagtgtgcagggatcagttctgtccttctgcaatgtgggtactggggatagaactcaagttgtcagacttggcagccagtgcccttacccactgagccatcttgccagccctatatatttgttttgagacagagtcttgctatgtaccctagactgacctcacactcatgatcttcttgctttggccttccaagtacttggatgacagttgtgcaataccgcacctggctcagcacaagatattttgagagtggcaggagagggaaagagacagtgaggaatcgtataatttttattacagttatattgttataattttctgaggtccagaggaccaaacccataattatctaggcaagttctctatcactgagctacatctatggcccattactattctattttatcattagttattattaagcaagtactctgtctctcagctccacccttagcctttagttagtgctgttaatctcttattttgctgaatttatgaattaatctttattcttgacatatatatatatatatatatatatatatattttataatatatctgtattatatatctgacttggtgttgtctgacgtttcagcatctcctgggagtcctgtaacacatcccccaaagataagggaggaatggcataataagacatacattgacagatgcaaaagcctcagtgcaatttaagcaggattaatacaaagaaaataataagtaggcatatcacagcccaactctggaaatgtgaagataaagggagaattttaaagctgtcagaggagtagtcatccagtaaccacaggaacagaatctgagtagcacagatttcccatcagaagcaacagtggcatcttacaggactgaaagaaaaacttcctgtcagccagatttctgtgtctactggaaatactcttcagggatgaaggtggaataaaatactttcccgttaaaggagaatgagatctgccaccagctgacccatataagaagtttttgaggatgaaaaaagtgagttctaatgtataatgggggagagttcttgtttcatttggcttttaatttgtttctccccaccccacctcttttgtttccatagggtctcactctctagcctaggctggcctagaactcatggcgatctccctaatcttggtggggctaggattataggcatgagccatcaggctctttaggaaagagtacagagccttggcagtgaaaaatatgtgggtaaattcaagcaacatttaaaacattttatttaaaatacatattaagaggctgggcactgtggcacatgtctttaatcccagaactgaggaggcagaggcaggaggatttctgagtttgaggccagcctggtctacagagagagtaccaggactgccagggctacacagggaaaccatgtcttgaaaaacaaacaagcaagcacatgttaagtatttaagtccaaaattatagctttatggggtttataataatataagttcactatatgcagcaattctagcataaaggataaggtaaacccatattgttataagttttctaagttgtataatttaaaatgtgaattgatatagttgatgtacaaatgactgcaacagtatatcttcccaaagatgtcacagtatggtgaaggaagatgttttttcagatcatcataacatagatctttcttcttgggaagcttttcctggaaattttcttagtgctggactatgaggggtgatagaagatgtgaaaaagccatcttgtaagtggccaacagcaggagtgaggctgcaagagcagacagtgccatgcacatttaatgtacacaatagtcactgggcttgacttctgagagtggaagggccttttattggtccatgcactgctatggcaaagtgtcatagtttggatatttttaaaggaacttacatattagttcttgaggatgggaagtagatgactaaagtgtaggtaggtccagtatcgagtgagggctcacatctcttcttccaagatgatacctcagacgttgtgatcttacacagttgaaggaatggaagaaaataacatacagagtgtactccctccctcaagcccttttgtaaggaccccaatccagtccacaaagctgcatccttctaatggggactcaccaaaagtcttatctcttaatgatactgtgtgtgaattttgaggacaagtagtccatagcctcacaggagagaatgtctggggaataagatggaggataaattgagacagacagagctaggaagccagaatcaaattgcaaggtaattataaaaatcttgattaaaagcctggtagtggtggcacatgcctttaatcctagcattcagaaggcagggcaggcggatctctgtgagttcgaggccagcctggtctacaaagcaaattccagggcaggcagggcaacacagagaaaccctgtctcaaaaaaccaaaccaaactaaaccaaccaaccaaacaaagcaacactaggcggtggtgctgcacatcttaattgcagcactcaggaggcagagacagtcgaatctctgtgagttccaggacagcaaagactacacagagaagccctgtctcaaaaaaccaaaaccaaaccaaacaaacaaaaacaaaacaaaacaaaacaaaagcctgaaccagggattgggcagtgaagcagggatgaggacatgctaggaagatggtcaagaagtaacaataaaggctcaggaaaggttgcatacggaaggaatctatgcaaagctgaggttcctgactctggggcctgctatcaactaagacaaaggaaaggcaatggaagaaattgaagatagagacataaaggagataactgattgaagtacatagggaacaaaattcaaatgcttgagaaggaaagggaaggccgaccacattgttctctgaagcagaaagaggaagctgagcctgtctagaaacaggagaagtctggagatggagaagattatggaaaaaaaaaggggggggaggggtttggccttcactgctggtggtgtttgttttctctattaaacaggaggaggtagttggtgtagtgtgtgtgtgtgtgtgtgtgtgtgtgtgtgtgtgtgtgtgtgtgtgtgtgtgaaaggtatgacagggggaagagcttccagcacttcctgactgacctgtgacctgtgctcaggatctgtctgctgaaacagtgagttggctctatgagatccatgggggactggttccagaaccctctactaataccaaagtctagatagatattcaagtctcttgcatgaagtggcatagtatatgcatatgacctttgcatatcatttaaaatcatctatagtcacttataataccaaatggcatgtaaatctgtacaaataatcattgaactgtgttaatgaattaatgacacaaagatgtgtatatgtctagtacatacataacccctaatataccttttttttttgattttatgttttttagatagagtttttgtaaccctggctgcactggaattcactctgtagaacaggctggctttgaacccacagagatctgcctgcctcttacctcccaagtgctgggattagaggcatgcaccactattacacagctatatacttacttttgatccaaacttggaacctataaatacagaagactgtgtcatcaaatacaaggatagtttagctgtagcagctgtctccttcagaaagaaaacttaatttaaaaatgagtttattttttaagctgggcattggtggcacatgcctttaatcccagcacttgggaggcagaggcaggtggatttctgtgagttccaggacagcctggtctccagaacgagtgccaggataggctccaaagctacacagagaaaccctgtcttggaaaaaccaaaaaaaaaaaaaaaaagagtttattttgtatattgtgtgtgtgcacacttgtaggcagtaggcacaagtgtgtgtatgtacatggcacaaggatggtctgagagggtccatgccactatgggtggtgctacccctaggcaggcagtgctgggtggtataagaaagcaagctgagcaagccagggaaagccagccagtaagtaccattcctccatggttcctgcttctgctcctgcctgacttctctcaatgatgggcatgcaagtcaaataaaccctttcctctccaagttggtcacaatatttgccacagcattagaaaacaaaccaggacactgtttgcaaaagaaagctttcttattctttaattaacacccaaaatcatgaggtcataatggcattttcatacaagctttgtttttgctgcacctcccctcccacacacccctgccttcccacacttggctctcttcttcccagtagaccttttctcctcttcatgtcccatgtgttttaccactttcctcattccttccttaaagtccttttcccttctcatgttcacctttaatcctgctcaggatttttgatgtatatctaagccaatatatatctatcctccccatttgtacacagatgggtactattattaagtactgcttcttaccttcctaactatagtaaatcttgaaggttactatatgaaggtcaactatatattgatcttcaatatatagtttgcccaggtttaagggctgccatagaatcccaataggaatgtacattatgttatttaacaaattctctcttgctcagcatttaagctacaccgaatctcttggaatttcaaagactatcatattataacaaacaaccttttccattggggcaatatacctgtaacataagagttctagaagcctagctgctgagttaaagggaacatacattgttattgttttgagacaaaccctatgtaagccaagttggcttcaaactagcaatcctcctgcctcagtttccagagtgctggaattgttggcatatcaccatgctcagatcacatttgtcatttaagtaaatgttaaattgccttccttagggtttatatcagctcatatcacttttacattttaagatgctcttttcctttttttgtgtgcatgaattttccaaactaatgggtttcattgtggtgttttcatacatgcatataacatactttgatcacatcgtccaccattacccttcttatcccctcttctaagtttgtttcctcttcagtgggtatgttaaaactgtgtttgagctggatggtggcaggaggtagatctctgtgagttctaggccagccagggctatactgagaaatcctgtcttggaaaacaaacaacaaacaaacaaacaaaacaaaacaaaacagtgtttgacttttgctagtctgattgatgaaaaatgatgttattgaggtgcttttgatattcatcttctcactatgggaaggtagaggaatatgcttgaaggctcttatttcttctaatctctttctttcccattgacttcagattgtacagacttttcctctctagagtctgtctgtgacaggaatcacaaattcttttttaacttatttgccttttaactttgtttttgaatcctcaccatccagaagttataagatctttgttacaggggctgaagagatggctcagcagttaagagcacttgttcttgtagaggacctaggtttggttcctagcacccatatgtagtttacaataatctgtaactccagttctatgagatctgacctccctaggcaacaggaatacatgtggtcacagacatgcacgcagacatgcaccccccaccgaaacaaaactccaaaaaagttttataaaaaaattgttatagctgggtgttggtggcacacgcctttaatcccagcactcgggaggcagaggcaggtggatctctatgagttcgaggtcagcctggtctccagagtgagtaccaggataggctccaaagctacacagagaaaccctgtctcgaaaacaccaaaaaaaaaaaaaaattgttacaatatttgtactcactagtctcttatacttataggagttatttcctaattagaataccttccacattagatggaagctgttgcatgatgctcctagttcctctggcttcatccactaattaaaaacatctttctggtgtaatgcatgaggtgtgtaccttacttacttttctccagttcatctctgattgttcccatgtttgattcttactttgctgttacatgctcacatcagccctgagtaaggacatctcttctttcgtgatcttcatgacttttatgccttgttgttgttgttgttgtttttgttgactttgctacaactctagtaaaatgttgactaatgcagaggtagtagcttgttttcgacctatctgagattaggcaggtaaaatgactaaatggtttttccttatctatctatctatctatctatctatctatctatctatctatccatccatcttgtatatgtgttttctcctgtgtacatatggaggtcagaggacaattcgcaggagtctgttctttccttccactagccagtgaatagcagggatcagcctcaggtcatccagtttggtagcaagcacttttactggctgagtcatctccctaatcctggctatgtgttttcagaatattatccacatgtttgcttttcctttttgccaacctgaaccattcttcagaatatgtgttgcctaggaaaccctaaatagcaagtatgggcttagctgtattttttttttctgccctttatcaatcatataaagttctctcttattagcttgttgagagtgtttgtcatggattttgacaagtgcttttcccttgttggtggaaatcatcttgcttgacctttatacttttaatgtggtatttatttatttattttcaaaacaaggttttgctacacagcttaggttggcctggaactcactatttggccatattgtccttccactcaagagtttcttatcttggcctcttgtgtgatggaattataagtgtgtatcactgcactcagtgggctttttttttttttttttctgttttggtttttcaagataggatttctgtgtgtgaccttgactgtccagaacttgctctgtagaccagactagcctcaaacttaaaaatctacctacctctccctcccaaatgctgggacttaagttacgtgccactacacccagtagtgtttatttctttttgactattaattagtttggggaagaaagtccaactattattgccaagaccttcaaggtttaaggatggatctaactgcgacaacagagaatgaagaaacgacagacaaacatagcaaaggtgggatcaagtggcctgtgacctccaatggagatgcagcagcagcagcagcctgaagtctcagccagtttattgtaagcatcatgaacaaggaggatgtaggctagctaatctctgtagagcaatagttccaggttgccatcatccaggaggagaaagctgtggctaacggtttctgcatatgcttgttttagctaaaggtcaatagttcataaatgtctatactgggaccagaggaaggctttgacattcctctgagcctaacctggggaaggctttgtttttcttatggatatgaggcactgggatccttcacatggctgtgctcatgtcagctacacactatcacttaggacttaatccattccccacagatcatttatcatgatcattatccttttaatgtatttactgagtctatttaccaattctttgataattaattttatattttgttcataagagatacttggtttgttgttgttgtttgttttgttttattttgagatagcctagctgtcctggaacttgctcgatagatcaggctggcttcgaactcacagagatcctcctacttctgcctctgagtgctgggattaaaggtgtaagccaccaccacctggctcataagagatattttggtctgtaattttcttctcctgcctttaccatatattgacttgaaagaccacctgagttgaatactaaattcccgtttctggatttcatgttacactttgtctcattggcatttgtcttccctatcttatagcagatgccttgttagatattaggagttaggctgttccctggctctgctcttccagcaaggcacaggagacaaaatgcagtatcagttttattatgtctcttcctactccacagtattatccataggatgtatgcttccaagttgaacagctgggtcagtggggaaacatcattttaaggacctagccatttttgtcagccagtgtctcatcagcaaattagaaatgatactaattgttttaaccaggggccttaatttaaggaataattgctattgttggaagaactgaaggagcagaatgggaaggtagaataagcctgagggcagtgacttcaggaaactattattatccctaggattatgggaatagggaggagtcggttttactagagccctaaaagcactcattgctgtccctgaggaagatagtgcctgctgatggaactagtgtacactccatgctggcatgctgcataagggccttactatcaacaatggactgcacacatgccaaggtcccaaaaattataatgaagatgaaaaaccttggtgcctctgtaagcatacgaacatcatcacaagacaatgaatttctgcctggggtgattctgatgtaagcacacatactgtgtggccagtgctataaaagaataacatgtactattatttatgctgtataccgtttgatcgtgatagcaaatgaagatactggtggttttatgtatccattacacagtagtctagccattattttagagtgggcttttattataaaattaatgtttactatttggttggggagatggttcagcagctaagagcatttgcctttcttacagaggacctgggtttccttcccagcaccacttggcagctacaaccatctgtaactccagttctaggggagctgatgccctcttaagtacacagacacatgcagacaaaacattcatacacataaaataattttgaaaaatgtttactgtagctggctatggtagtatatgcctgtattaatcccagcactgctgaggtgacaggaatatcatgagattagtgtagccttggatacacagtttatttggaccaaagatcttctcaccccagatcaggcaccaatgtccaaagaaacgattgcacctaagtcctgcttggtaaaccattagatttattggacttgcttacggaagcatgggtgaccccagcagcagtgaaagtcccagcctagcatgcatgatgacttctcatagctgcaccatgagggtcccccttcagttagccttccactgtctacttaccctaggacagaggcagagtcacttacagctagacgggaggctcaggagacagtgggaagaatctcaagggacagtgtgatggccctctgaaatctcttctattatgagcagcctgcccttgttaagcagttcttgggggagggggagcagtcatagctgctgtgatcacactgttgtgctcacgatatagtgttctgcaatacagggatacgtaagggaactgtcttaactaagtcgaaaaatatttatggtaaaccagtttgatgcaagtcaggcattggtggcgcatgcctttaatcccagcactcggggaggcagaggcaggcggatctctgtgagtttgaggccagcctggtctccagagtgagtgccaggataggctccaaggctacacagagaaaccctgtctcgaaaaaccaaaaaacccccaaagaaacaaaaaacaaaaacaacaaaaaaacaaaccaacaacaaaaacagtttgatgcaacggcttcatatatcttgagtttcttgtatcctggttacatcaccttctcttctgcttgacttaatttagggctttgttcactgtagccttaggaacaatagactatgccatagatgtgccccatgtggtctaggtatgtgataggctacactgtctaggtttgtgtaagaacattgtatgatgtttgcacaaagacaaaatcagctaaagagatgtgaaaacatgtctcctttgcaaaactacagaagcctagttagaatccctgcaggatgctggaaccagagtcatcggttgctgcagctgggaaaaaaaaaaaaatcttccctgttgtgggaagcttcagagacagctgcagcagcagaggaataaaatttttccttcctttctgctctctagtcagctgtcagtgtctcctatccaatgaactagccagaagcaaacaacaaaggagtttgcagggttccacttcccaagatacagagataactgccgctggctccatgggcattctactggtacagtcactcagggccccacccttaaaagaaccctgtgcttggtttaatgttccttgtcactgcctgggaattttaatttaaaaacaagagtttcacaattttattttgcacccaccctgcaaattatgcggctggtctcatagaccagagcatggaggggcatgaatgaagcagacagccaagagggaaatgccagagctgccgtatgccaaattgctatcctcaaagtttataacaacttgaatgtcttagcaatgtagagagttgcctgggaaaccataaatggatttttggtgctgatagacaagtttctaagatttttcctcacactacatgtaatagttccaaaagcggcagtggagaagtcaacgaactggctcttaggtcttcaacctagagcgtcatgttataaggctgtcatatgtcattttccagggtcactcctttaggaagagacctggctgggaggttctcaagaaatctctctattattgccttgcttttgtatgtctggtggtctttaagttcatcctatttatctgctagtgtctctcttctagcatgttggtgtagagaacatagggggtcagactctctagcacttggagtctgtgagattcagcagatgctaattccagcgcatctcctggaagaagatggctcttgattggctccaaattatccagcaatagcaaaggtagggaagaagcagaggcatttcaaagtattggtagagtgggtaagctattgcagggaccagagcacagtcatagaggagagtggggaggggaccaggagaagtagaagaatctcataagggagcccagaaccactgctttcgccctttaagaaccaagaaaagcttgctttgagatatggaactttcggatacacctgctggttaactaaaatgtgcttctggacatctgtttctttgaattaaatcacagagcccataggcagttttctttaactttttgtacaagatgagattgatttttgttttttaatcccagctatctgccagtgtgtatctagctagaattggatatgctagcttcagttcccaaggatagaatgaatggtggacggaacaggaacaatccggacctccgaagacctacagcctgaaaagggaggacaataataaccagtagcaatatggcatgactactgctgtggcaggagagttgaagagtgcttaaagaaaacataacacctcattaaaacatcagcgagcccctggagtccagccgagcagcatcaaaccaagcaagaaggggaagatggatgaatggagggcggccattccagaaaaagggggcagccagcacaaggttcctgaggtgacatcttactttgcatgtaagaacggacggaaatgcaatgtggacaagtagcaatggagctggggaggctgagaggcaggggcagctagatcctaaaggacccgccttctcactacacacaaacctaggctgatctctaatacagcaaggaacaaaggaaaaagaaaaggctgagctcagttccagatagatctttgaatactcatgccctttacccaagggcaatggcaaatgattcagggattcagtctcaggaaagagacataaggtacaagtcatcattagtgctgtgatcctagcactcaggaagctgagacacgaagattgggaattgcaagccaggccagaacatgtctcaaaaaaatgtagcgagagaggtttttaggcaagcataaagactcgccttttgaataagttgagtttgtggtctctgtgggttgatcaagtggagttgtctagtagatggatgttaattattagtcactaactgagaaccttaaattacatgaggggagcttagcaagctagttgctgtgcaactcttaaaggaaccaagcacagattcttttgtttggcttcaggagacactaagcaaaggctaagcaaagaatcttacaccaccaaaaattcatggctcctcccagctagctgcagggaaggtcccctatgtttttagcatttgtctcactgctttcctagtagtctgtttcccccgtttaaaaattagagtagattaggttatgagctggaggcaggatctgagctgaattcatctttaggttcccagtgtttcataagatcccctgaacacaatagactcatctttaccaaatgactctaatttgtatcttaaaattcatctgctgagtctaaaggaaattaaaacaactatgtattttaaagatagtcagcattttttgcataaacaaaaatatgtaacttaaacaatgaaaacaaatttaatatctaaatttctaattttgtcttttttctctttcttttccttctttctttctttctttctctctttctctctctctttctctctctctttctttctttctttctttctttctttctttctttctttctttctttctttctttctaagacagagtcttaatacgaagcctggctggcctcaaactggacatatagcttagactacccacaaatcatatagatcttcctgcctctgcctctcaagtgttggacatgccaggctttgaaaaaaaaaattaaataatgaacagcaacttgaaagttaaatgcagtttttttaaaaatataaactgtaacattaaaaatctgtactttctccccttttcagttttttaaccttttgatgacttttacactcacgctgaactaaaaataaagcagagcagagaaaaatacctctaggtcaacataaaagctaaacatgggagtgctttgaaatgcatgggggctggggctgggattggggctccgtgagagagtgcttgcttagcagacaggtgcagtccccactgctacaaaacaagcagataagtaaaccataatctcattactcagaggttaggccttacatttaaaaaatcaaaacagaagataggggtcaggggagaagggaggagggcaggggcagggagacaaagaaatagtactatatggagacagagcatgttgtttggaaaatgcaagacactgggctaggcaaggggatgtgtgtctggagtctcaagctacttcacaggctgatggaagatgtcttgagagccatcctgtgtgacaaagaacttgtgtcaatgacataaaagccatgggtgatgttcattgcctttcagtcctctcactggcatgtatatacatggcagaaagtgtttggtttaaccaaacacggttcacaatttacattgtttctaacaatgttccctgtagttagctgttgaggaaactgatgatgggttttttggtttagattttatttatttttgttttatgggtatgagtggtttgcctgcatgtatgtctgcatatcatgtgcatgtgatacctgtggagtgagaagagggtgttagataccccaagaccagatgggaattaaacctaggtcctctgggagatcggccagtgctcctaactgctgagccatttctctagtcccacttggtgagattttttatttttgctggaaacttcagtgaaagacatatttcttcttctccttctccttctccttctccttctctttctcctccttcttcttctttttggtttttagaggaaaaagtttctttgtgtagtccttgatgtcctggaactagctctgtagaccaggctgaccttgaactcacagagatccacctgcttctgcctccagagtgctgggattaaaggcatgtgctaccactgcttggtgacatacgacttcttattcactacttcactgaacatttgagtggaaacatcatcatgccaaaatcaacacaatgaaaggaagaaaaggaaaagaaatggcaaataaggtggcatagattgaatatttgagaggaaagattattgtgccaaaatcaacacatgatgaaaaaaagacaaggaaaaaaactgcaaataaggaagcatagattttcacgggctattaaactgaaaagttgccaacatgtacaagaaaatacaaaagaaagctgaatgaggagagatggatacatgaatgggtgactgaacaagtgaatgattaataaggctgtcagtaggaaaccttgttctatgaaagatgaccaggagtcaaggaagcatgtcatgatggaggagatgatggaataccccaaaagaagacaagttctgagaatgccagtatgaaaacgttccagctgccccgctggggttactgatcgagttggctcctttgggacttcaatcttctgctttgttaggaggaaaaccccttgtctaagactagacacagttctgtctctccatcataagccttccagcagcaaaattctatggaatatgcatcatgcattttacaggacagtcaattttccagattcagtttcatcatgaggtccaatatgtgtttagtttggcaagaatggtggtcacagagagactatgaagacttgggctaggatagaaagaacggttaatggttggagttattgtacttgagcagaatattcagtaatgaggtatacttatggctttgcacagcttttctaaaagaatgtccaaggggaagactaaactttcattgccataccaagggctcactctgacaccagcctccctgttataaagtaggaaatcagaaattgaagagagttagcgaatgaataggtagtgaacattttcattccgtctctttgctttgtattttatctggttcattcatgatgactcttgcttattgtttactataatatgtgggcaatcagaagagtgaaacttcttagtgtctaaggactggatttaaaggatgtagtagtttctttgaaggcctgtgttagtgttatacacacacacacacacacacacacacacacacacacacacacataatatttaatgtaaaaataattttatcatcccaaattattaatcatattatcactccaggaaaacttgctgatatgatgtattttgtgtctttccaggtagctctcatctccattattgctatattaccacaaactcataatctgagatgtacaccatgacaagttcaaaggtaaattgaccaatgaatttgtcttaacatttaagcatgcattttcttgccagcagctctttctttaactgcaaacaacagaggaggctgagtccaccaaacaaaggatcatcaagcaatgggccaccctgctgtgatgatgggtggcagcttgccactaccacttcctttggtcaggcgcataattagaaacaaggccaacaaaaaaagtctcatcagatgatggtgcacacctttactcccagcacttgagaggaagaagcaggcagaactggccaatctagtctaaaagtgagttccaggacagctaaagcaacacacagagaaatcctgtctcaaaaaacaaaacaaaaccaaagaattagcataagtctaccatcaagattgcattgtaatttaatcctagcatttggtagacagaggcaggcagatctttgagtttgaggccagcctggtctacagatcaatgagttccagaacagcaaaggctacacagagagaccttgtctcgaaaaacaaaaacaaaacaaaacataaaaaaggttgtactgtggggctggagagatggttcagcggttaagggcactggctgctcttccagatgacttgggttcaattcccagcacaaacatggcagctcacaacttcctgtaacttcagtttcaggtgatctgacaccttcacactttcatatatgcaggcaaaacatgaaaccacatgaaataaagataaataaaatttaaaaaatggttgccctgtgagtttatgtcctaattattatctttgctccaaggtaccaatgatagacaaaataaaaagtgaggaaacaaaatacatatagtcgtgcgcaaaaataagataagcatttgccattcagagatgaaacagcagggcaagtagagagagaactgaagcatctggccaagcaagtgcaatcgtcagacacaagcaggaatcctctcttgcttgaaacagagcctggaggagtgtgggcacagcaaaggatgaaagctggcttctctgctgaaagccagggtctgggaggcatcagtcactctacatctttggaagatgggggggaggtatcaggaagaaatgaaactggccattgtctaggtcacatagggcagagaaaataggaaggcagaaaaaagcagatcgactcttggtcaggatctaaatcaagctacttatagcaaaaatgcagctattatcctaggttatctcctccaaactgtaaattataaactctaattgtagttcagaagtcctgcaggtcttgcttgaaaactggtggttgaatcatttttttagactaggaataatgaggggaaagtgtaagagaaactctcacagaggacgaacctgaaactaaaacactgaagaaaataaactgagaagcagtccaacaaaatcaacaatgatcaattgattaatctgaaagcaacttagatatgtttaagacactcaagaagctgcaatggctcacaccaataatcctagaactcaagaggctgagtcgggaggattactgcaagtttgggctacatagaacaagatcctgcttcaaaaatataagttgattgattaattaattaaagaagctacaaagtatgaaagtgcaatagaagggaattcagatcagatactataagcctggtcaaaaactgtgactgagaaaattacaagacctagttgagaaaattcatgttgttgctgttatgcctgcatcatgagcccccccctcccccccccccccccgcgaccaccaggagtctgagttcatatgcaaaagccaagagtcttgggttctctacctggtccgacaaagcagttgtacctgggagtcaaattgccttttaaatatttatgcttatgcccatgtattagtgtagccatcagctttggctagaaaccctgctttttccagtgggtggtggttgttagatttctgcttaaattagaaagacaagagagatgagactcgaactatagagagcacattaaccgatttattatagggcagaagagtgagagggtgagagagagagaaatgaaagaacagagcagagcagagcagagcagagcagaggagagagggggtttgaccgctgaaaacagagaaaggggagactaacgctttgggcttataaaggggagctcatgcatatgctctgagtctctacgcagccccgtaatgagttacgtagccatgacatggccacgcaacacaggaccctttaagctgcctaggtatctgcctgaacctgtcagtggttacttcaaagacttagaactaaccaaaatgccaagaataaatgattgtcgaacgctcagtcctaaatgggacttgtatatcactttttccaagatgcagggaacataatggaaaatggggcagaaagaatgtatgagttggaagaagagtgggatattatggaatgctgtctcctgagcacgaggtagccattatgcagccatgtctgcctgcacaagatctgaacaatattggaccagtcaatgttccatcaagatgggaagaatggtgtcacaaggccccacccctgattgaggatctttaggaagttactggttgctgggaaagggagaaacattttctctagtatgtagtccttggttatctgcccatattcctgtaactaactcattacccatattcctctaagttaccccaacgaagtcacctatttatgaaacaaacaaacaaacaaacaaaacagccatgaaagtagagggggactagctgagaggaggaaggagatcagaaagagtgggaagaggacaagagagggtagtggggaatgattatgtttagatacgttacatatgtataaaatgatacgatgaaacccattgtatgtgagctaatacatactaatgaaaaactctaaaaaaaatactaaaagggaaatacatactaatgaaaaactctaaaaaaatactaaaagggaaaatggaaatattgatttgataaaagaaattatgaaatagaagcagaagtatagccattgaaattaccatattcacctcacttactagatattgagaaaatttgaaaataaattagtattatattaacggggtaattaaaatgatggtataaatctaaaagggtataatcaggaaaatagcaataatgatactaaaatgaagtaaaatagaaactgtaaaactgtggcaaacaaaagctgacttcttggaaaatctcataaaatagtcaatctctggcaagctcattccaaaaataaaaggggaaagctgtaagcaatattgaaatcattctgcatgtaattagggattaaaaatattgcaaatgatgaatacaaacaagctcatgtctctaaatttctaaactgatagaatgggcagtattttagaaaatatgccatcctaaaattgaattaagaaagagagctgactgtgcggtggtggtacaaacctttaatcatagcattagggaggcagaggcagactgatctttgtgagtttgaggccagcctgatctacagagtgagttcctggacagccagggctacacagagaaaccctgtcttcaaaaacaaaacaaaacaaaaagaagaaagaaagaactggctagcacttgaaggtcaaggaacagaaattacaagttcaaatcaacctgggctacatagtgagacctagtgtcagaaaaacaaataaggaagcaagcaaactaacaataaccaacaataactattagctattgacttgacaatttaaacagcattaccttaatgatgtcagaatcagattcttttttaggaaagctttactaactcttaagaaagagacagcgtctttgccaagagatagcacctaacgtgaaaacagaagcacctgcccctcacaaggctgaagccaacacaaaggctttaaaagccaagatagtgctgataatcatccagagtcacaaaaagaagacaggcaggtcatgtagctttagttgaccaggaagtagtcctttgtatctttacaggaacacccccaagagaaacaagtgtgtccactgtgccagcatcaagctctccctggttgctgagaacatcatgaagaggacagacaacaacagcacacatgtgatcactgtggatatcaaggccaacaacaagtaccagatcaaacaggctgtgaagaaactctatgacattgatgtggcctgatcaggcatgatggagagaagaaggtgtatgttgaactggctcgagattgtgatgctctgggtggttattaacaaaactgggatcatctaaacttagttcagaaaacagagtggggttgctagggagatgactcagtggtttagagccctggctgctcttcgggaggatccaggcttgattgtcagcccccacatggcagttcacaatcatttgtaaattgagttccagatgatccagatccaacacccgcttctggtttccacaggcattccacatgtggtgcacagacatatatgcaggccaaaaaacaaagacaaaaacaaacaaacaaacaaacaaaaaaaccaaacaacaaaacccccaaaagccaaaacccaaaacaacaaaacaatataaaaaccccatacatataaaataattttaaaacacagaaagaattctttttgtacaaactacgtacagaacagcaaaaggcaggaagcaattcattttataatcaagaaaaatcccttgaacacagtcagaaattacatactattttgctacattattaatagatatgaggcttaggtacagcacaacaaatcgaaaaacatgacagaaaagtgtgactgtccaggggcagtgattatgaaggctgcttcagaggcaggcaatcgatattcaaggaagagcacacaatcattttaatcaattagctgaaaactaatcgattgttgttttgtttttttgagacaggttttctctgtgcagccctggctgtcctagaactcactctgcagaccagtttaggctcaaactcatagatttgcctggctctgagttccaagtgctaggactaaaggcatgtgtcacactgcccaacaggaaaacattttatgctaatctaaaacttccaagaagcgtggcattcatgataaaattccagctttccattagccagaaacaagctagatcatctccataacttcctcaagtcaagattatagaagtcctagtgttgtagttacttttctgttgtggtaaaacaccatgaccagaagcaacttatggaagagtttattttggcttatggttccagagaaaaagagtctatctcagcagggaggcatagcaattagcagcaggcatgatggcaggaacaggaagctgtgagttcacaccttcaaatgcaagcacagagaaggaacaggaagtggggtgaggcaacgaaatctcaaaatttagccctcagtaatttacttcctctggcaaggcttcaccacctaaacctttccagaaggaaccaacagctggaactgagtggtcacatgtgtgagtctgtaaggaacattcttattcaagccactatacctagctaaagcaataagaaaaggaaaagaaacaaagacataggtgttgtgggtatttatacactgtgtgaaaatatgttgttgtgattggttaaatgaagagctggatgaccaatagctaggtaggaggtaaaggcagaacttctgggcagaaagaagtagagagggttaatcaaggtgtgtgaaaggtactacggagatgtggaatgagttggacacacagaatgggagagaggtaaaagccatggggtaggatgtagattaataaaaaaaaaaatgggttattttaaatcataagagctaatgggcctagtggtgatgcacacctttaatcccagcacttgggaggcagaggcaggtggatctctgtgagttcaaggccagcttggtctacagaaccagttctgttacaggctctaaagcttcacagagaaaccctgtctagaaaaaccaaagagagagagagagagagagagagagagagagagagagagacagagagagacagagagagagagacagagctaatgggacaagactaagctaaggctgagctttcataattaagaataagtctctgtgtcattatttgtggctggcggtcccccccccaaaaaaaaataaaaaagtactgctacatgtggtacccaacatggggcttgaatatctaaacgtagggcctgagaaagttaagacaagttctggaaaaggagccagatatggattcctagacctgtagtcactcaggtaggctggtgctcagaagtatacagagacatgggtcctggccactgcctgtgggctggaaccagctaccagcaccatgcgctaaggtgaatgtagaacgagacttttctccatctagcatgataggcttgcctacagccagatcttatagaggagggaacctcaattgagaaaatatctctataagatctggctgcaggcaagcctgccatgcattttcctgactactgactaatgggggaggacttaaataactgtgggtggtggcatccctgggctggtggtcctgggttctagaaagcaggctgagcaagccatgaggagcaagccaggaagtagcatccctctatggcttctgcatcagctcctgcctccagggccctcccttttttgagttcctgtcctgacttccttcaatgatgaacagtgattggaaatataagccaagtaaaccctttcctccccaaatggcttttgtcattgtgtttcatcacagcaatagaaaccctgactaagacactgggagagccattatatgggcaacttgttatctaccctctgtgggagctgaagatatatgtgtcttttcacaggtcattatgtcctagaaaagttcttgtaaggttgtcattgaagccttaaaatggcaataatgaatgttttgacaaacaaatgtttgtcaaaagaagaatggataaataaatcaagagctattcatctaagagcaaaataaacaataattaagtgaatggattgtatctacatgtagaataaggataaactaaaaaaccagaaaatttaaaatttaaaaagcaagtttcaggatatgtatttcttttaatcaaattataaaattaactgcagataatgatagttactgcttatggacacacacacacacacacacacacacacacacactgtgtagcatgaataataaaaacccagaaacacccattggggttcaagttaaagatcagataagcaaagcagccagccactagagagctctcaccagtaccaatgctcagaccgaaggagcgatccactgaacctcagaccgcatctccagactgcactgttctccacgaagcttcagaatcctagactgctttgagactgcactgagctcctcgtatgctctctagtgctgggattaacggtgtaaattctgttaattttttagactgattcactctcttttagcctggggtggccaagaactctgagagatccatctcctgagtcctgggattaaaggtgtgtgccacctctgcccggcatctatgactgtggctagctttacattctgatcttcagtgactttattagatcataaacaatatatcaccacatatatgtattaaaatagaaaaaagaaataacttgaaggctaaacacaaatttcatggttgcgattacttcttaggaactcagagtagggctgacaaaaggttcaagtgtagatgtaacatttaggataaagatctaagcctagattggagcagctgtcagacattatcagggaaatttctttgtgtagtggctggtggctagtgcggaaacttacatttggtcaatatgcaaagaaaaagcatcagtggagtgctcagccacaaagggggaaatctatgtaattgtccctatcctcaggaccactgcagaagaaggggtaggaagattgtaaaagcacaggagcaatcaatcagtgtctttaagacacaatggacagctgaactcatgaactagtggcagctatggctgcctgcataatttcaaaacaattaacattgtagcatagagagggaagtgactgacctgccctcatgcttagatgaggagctattgacttctcgggagtgagagttctctttaaggatatggctcctggcaggttgaacagtgagtgcatggtcccgcacccaggaatgtagatggtacaaattggacttgatgggttatttttaaaaatgagttgaggtgtccaggaggtagagatgggagtagatcttggaggagttggggggaggagtgggagtgaaaagatcaaaatatatgaaattcttaaagaatgaattttaaaaaggtacaagcctattatagctaaacattcacatttgtaagttgactttttttttttcttttactattttgttatgtagcttagactggcctaaaacaaaaaatccctatagttaggattatagccataagtcactaccactgtaatcaacaggttttcagaataagataaagagagagagagaatctgggtatcataacatgtgcctgaaatcccgttgctggaaaggcaggagattttgagtggaggccaactgggctgcataatggagaaagagggaggaatgtgtttggaggggcgcgggaccatttgtgccaatttacagtccttatctgttgaaaccctaatccccaatgtgaggatatttggatggggaatttaggagtagactggatcaccagggtggagcctcgaagaactgggttagtgcctttatgaaaagatccacaaaagcaattatctttccctctcagctacggggtcacaacttcctgtaaaccaggaagagggacttcagtagggatggattcagctgtaccttgatcttggatttccacccactagaactgagcacagtaagtttctgtttaaactacccagcctgtcatttgctattgtaggctgaagaaaggctagtgggctcctatgacttccccagtcatagcgtccttgcagaaactttgaagagcttcatagagtaaggcacacagcctagtattaccactttagcagtgtactttgcacgccaacctttctttcaagtttccagagaatcctccatattcttctaagcctgacctagggcaggctgtgcttagcattgttagaaaccagaaggacacattgccatataacttcagtctgtcaggccagactgcccacacctgggtcttggataaccaactttctgctccagttctgctcacaaatggtcttagctactttctcactgctgtgataaagtatcctgataaaagcaactcaaggggggaaatatttattttgatccacagttccagaaagatatagtcaatcatatcaaggaacacttggcagccggagcaaggaagctggttggtcacattgtgtatccatttaggaaacagcaaacaggaagtggggtcaggctgtaaagctcttccacagtgacatatttcttccttccagactctacttcctgaaagttccaagccttcctaaacagcaccaccagctgaaaaccaagtgttcaaatgtaagagccgatgggagacattctacatttaaaccacaacataagcatgaattccatccctctcctactgcctcatgaacagtctggaacaatctacgctataaggtaaatatatgccgctttctcccccacctttccttttaaaaatttaattactgggggtgcagcatatgccccatgtacacatgtgatggtcaaaggataactttcttttcttctatcattatgtgggttctagggatggaactcaggctatcaggtttgcacaggagtggtttaccctctgtgctctctgtctgacccatcacttcttactttttccacttgcttctctggtttgtgttctgggattactgttcatcctgtgagtctgtttctctctgtctctggtctgttgcaactctcccttttctgctgtctctttcacttgtatttctgcccacttttccactctctggagtgccatatggatgtgtgtgagaaccagtgagagtctcccatcctgtaggccagcaggaaattacagagaatgctgagcattgtgtggatgaaggtagaacaggatctgaaatcctagatgatgggagctatttaaattccatatagcttgagtggaatgttattttagacttcttttattttgttgtttgagacagtatctttctaggttgggcttaaatttactgtgtagcctagggtagcctccagcttgcaattctctgctcctgctccagagggctgggattgcaactgggcactgtcaccacacctggtttatttcagtcactctgaagcttctagtcctatctacagcattctcaccaatagattattggggttgggatatgatggtagaagagtcttcaggggtctatgataatcctaggaatatttttcagtgtttttcagccaactcttcaacttccagtccctggagcccagtgtgtttgcaatataagagtattagaactttccctatgggagccccctccttatcccaaaatctgtgctgcattttcgatttggtagagactaagagaattgaatgatccgaggaagttgtgtgttggtgtcaggctaatttcaatgaattataaattgaattagctatactgaaggaggcctttcatccagcccaagttaaatgaactggggtttaggatgtcagtgctcttgtatttcatatgaccatgctggatgtaaatgggaattttacacttaaggggaagtatcatgggtgagttattttagaacgacagctctatctttgcatcacacttccatcatttcagtgttttatgtgtcttcatccctgagatggaggcaagctttatcaggggcacgtcatggttggagagatggtacatggatattaactgactttcaccttgtagagatgagtcattcagggtcacaggtctccctttttactgcttattctacagggcagcagcgccttgtggcctttgagttaaacatctctgggtggctctgctgatgaaggcagtctgctggtgaccttgaatgactccgcactctttctggatgcctgcttgcttgatttaactctggatggcaagcccatacttctggttatatcctgctttcattttctttttaaaattgccaatgatgaatcaccaatgagtcagaagtaaggaattccacgttatgtagaagcatagactctctaggttagaaaactgggggtggtggtggcgcttgcctcctatatactagcactcaggaagctaagacagggcagttgagaatttgaagctagtctgacctacatatgagttagaggtcagcctgggctatataatgagagactatctcaaaagatcaaacgagggaaaccaagccaaataaacaaacaggtctctgaaaaaaaaagtcagctggcttactcttgcttcaaagagtgaaattagtgaaggaattaaaagaattaagattctagatctccaaccctggacctacagaaatgaaaaacaccaaaatgaagacaggagtctgtttttaagagtccctttgtgtgccccatgtagatttagaaaccatggcttctatgaaactcttgcaagtgtgagagaggaaatgttcactccagctgatggggaggtcagaggtacagtgtccctttaaaacaatgagcagttggtgggggttgctgttgagaacccctgtaccttgttttggtgtatgggggaatcttagatcctaagaatggaaactaaaaagaaccccgagcagaatgaagctcagtgccacgagctgtgcaatcctcagccaaccattcccccatatctgggtctcattgtacacatatgtaagatgacaacatagactttctttttgatacagggtctcactgtgtagctttggctgtcctggaactcactctatagacagagctggcctcaaacccagagatcctcctgcctctgctgggattaaaagtatatgccaccatgcccaccacaaggtagacttggtctctgagttgcttctatgtcattttgatacaaacatgatatactcagaaaggctttttggttgttgttttatttttttctttcttttgattttctttctttctttctttctttctttctttctttctttctttcttccttatcatgccttgtaggacctagcacttttcctgctgagtctgttttcagtcttaggccaccctgagcaacaaggatgccatgcctgttctccaggtcagtgtagttgcccgggaaactccagtcatcccaagatgattccgttctatctcagtctagaaaagaggtccagaagggaaaggagcctccaaaaggacaagctccaaggaagagggggtagaattctggaatgaaaaaagatttggaagcaaagctagttctggtctggtctggagagagttaagtgtcccgccaggcatgtctgctctgggtgagggtaattctatctgtggcttgccatttccaaaggtgaccagagaaggctccagcaattggcagggattaaatgttttgcagttactgtgctcaccttgctcctgggtcatggcaggagaagtgtgaagtggttaatgttactggcatcagcactgtctcgtcagacccaagcctggccagtgggaagaagaaaagggcctgaaacagcaactctatggccagggaggaccaagtgctcggatcactggtagggaccagcagacaacagtcttgctaggagagcctatggccagaagtcaagcaatgaatgttccttttttttttttttttttttttttgtttactttttactttttctagagtcagggtcaaaagaggacatattatccagcatttttcagtgagaagctacacagacaggaactcagaaaaacacattgtttcagtttgttttctttagtgttggcagtctaacatggcagtctccctaagaagagacttgggagccaggtgtagtggagcatgcctttaatcccagcactcgggaggcagaggcaggtggatctctgtgaaatcaaggccagcatggtctacagagtgtgttttacaacagccaaagctattatacagaaaaaccctgtcctgaaacaaacaaacaaatgaacaagaacagacttgggtgctggagagatggctcagcaattaagagtgcttgctgcgggctggagagatggctcaaaggttaagagcactggatgctcttccacaaaatcctgagttcaattcccagcatctacacggtggctcacaaccatctataatgagttctggtatcctcctctggtgttcagacatacatgcaggcagaatactgtatacacaataaataaatacatttaaaaagaaaaataaaaaaaaagagtgcttgctgttcttgcagaggactggagtttggttcccatcatccatgtcagacagttcaaaccatcagtaactccagctccaggggaatctcacatcctcttttgacctccatcatcacctttgagtacatccacaaacacaaataagtaataaatcttaaaaaacaaaagcaaaatctagactcagtatgttcattctactgaggaaagtatggcaagaaagagtctgtatccagaaagggaggcaaatgagagaccctttggggtgggtttacttgggagttggatcaggactttgccagaaggaaaagggagtggacaagcattctaagccaaggagatgacagagaaatgtgcaaaagacaaagacagttaagtatgcagtgtgtctgagtgacagaagcaggagaagctgtcccaaggacagagagatgctcccaaggccagggaaacttctagaccttgctgaagaatatgtaggtgaagcagggtgctgaaggaggctcttgttaaacagtagcattcagagtttagcctagaagcacagtggagggcataggggcaaagagcaagaacagaaccgtgacaaatattagatctgagaagacaatccttggctgagagaacaaggctatgttttccactggccttcccagaatggatctgatggctgtccggagacaggcactataagaggaagcaaggagcattcttattgttctggtctgagtaagatccatgaatcagcacccctcatctttccccattttctcttgcttggttgactgaggtaggacccacccatcagcttttgtaagtcacatggtatggtttgaatggtatggtgaaatgtccttcacaaggtcatgtgttttgactacctggtcaccacctggtggcactgttttgagatattctggaacaaaagggagttagaggtctttatgaatacttaagaataacatccttcaaaacttctttaggaattgtacattatttagagactgactgtcaagtttggaggaaatatgcatgtgtataaaattgttaagcattgcccacatggtgaaaaatgtacaaaacagaatatacagctcagggactgaacataaagcaaacttccacatagctctggatgtcctcatatgtcctcgctgacatttccatcctgtctgatcctcccctacccctgtaaaaacaactatccaaatgaaagtactttaaaattttccaggaccaaagagatggttcaatgggcaaaaccacttcctccaagcctatcaatgtgagctctatctcctatgggagaaagagagacctgactcccacaagttgtcttatgacctcctgttagcattcaggcatctctactgacctgcccttggggttctcacagggtatgtcctcagctgcagccactaagaacaccacctgtgcattcactatgttcccttttaaaagagttctgccccctctgcttctcagcctccccactggccacctgtttgcctcttctgctgctcctgttcccaggggccagtctcacccttcccctcctccttttccattccctttcccctaataaaaaatccctccatgtgagctctgtcacaaggtgtttctctctctcatgtcgctttttaaattacaacacctctactcatacagacacacacaactaaataagtaaatgtaaaaaaataaatctaaaaaaattttaagtgactatgaaagaagaacaaatcttgtattttcctcttctaatttcagatacaccctccacaccttcctggaccagttttgcctccggttcaacatatgcagtagtgatctatttttgcttatgtgtatgtgtaagtgtatgcaaagttcaggtacccttagaagtcaaaaaaggatgttagatttcctggagctagaattacagttatgagccacccaacatggattgtgggacctgaacttagctacgagaagaacagcgcacactttaagccactgagccatctctccagcccctcaaagtgccctgcagtaaaattgtgatggagctttgtaagttaagctgtgaccattcattaattaatcacctctgtgactttccgtagcttactttctatgttatgagaggcctgttttatatatatatatatatatatatatatatatatatatatataggaacaagtgctcttggaaccatttaaagagcaggcagagagaagaaaggggtgaactgttgagtttggtaacttcaaattgacttatatggtatctgggcatctttaaatggcttaaaaatttgtttggtgatccttctttgaaagctactgagtttaaatctgtggctagacttgctggctccagcacactctgatacttatggaagaagtgagttgtgtaggtttgtttagattaatgattatgtgacattgatgagcaagcgcagtgggccacatgaggaggttgactgggctgtggaacaaggtctgaagaagtctttggaaagacgggatcaccggcaagaaggcagtagtcactggcttcggccgttgctgaaggcaggctgggcctaccctcctcaagttcatggagaggtttacgaggcccagtgtgtttgtgctgcacttgacatttccacaaattgctctgtagttgtttttattagttttattccagctgttgctcaggggattttctggcagccaggttcttcaggccagcttggaatctctcattaattgactccaatcatgaaaaagagacatcaagcctgctttggtctccttcccattgagagccagataaatcccaggcaggcaccataagaaaagcagtaatgaggttcacacctccagtttccagtgcagaaccagcctggccaagtgttaagcgcagggtaaggtgtgagcccagaggaaccgggcctgaggaagaagcagaccctgagaatgtcattcctcctgggtcctgggtgggaggaggtttctcagtagtttcagcatctcagcgacccaaataaattcacaggtataggtgactcctgtgttttcacttcacaccaagtccaaagatgcacctagcttgagagaagcttgacctgaagtctcagtaagattttttttttttttctaggaagctattagttacagagtgaataggaaagtaacttgaagtctagaagaagactgctatcaacagggtataactgatgtgtatcgctgttgctgtaaaggacattttgttttgtgtttattattaaaaggtcatagtgaaggcagcattagcagaaaaagttcttactgcctgtcattgaacattccccagtggtagagtttttaaacaatggtgtggtatcaactgttgtgtgaaattaactctcatctcttttgtacaagatatcatcacatggtctctctctctctctctctctctctctctctctctctctctctctctcaatggatccaaatcaaatcataaaagatatttaaaaacagaggtctagttgggtagtggtggcacatgcctttaatcccagcactccagagacagagagaggcaaatctctgagtttgaggccagcctggtctacagagcaagttctaggacagccagggctacacaaagaaatcctatctcaaaacaaaacaaagcaaaacaaataacaaaaagcaaaaaccaaacaaacaaagacaaaaaaccaaaccaaacaaaaacacacacaaaaacactaggggtctaggtcttaccttgggtctctcagactatggctctttcattttagtcagaaaggaattaaggtaaatgaaatcaggcttcttatgtcctatttatagggaagttgagacattactggaaatcagaaaacagcatgttcacaaggcttggaaacactgtcttaaaaacaatcccaaactgggcggttggtgatacatgcaggcagatagatatccgtgagttcaaggctggcctggattacaaagtgagttccaggacagccaagactgttacatagagactttgtctcgaaaaaccaaaccaaacaaacaaaacaaacaaaatcaaccataaccccagtgtagggtgtggttgtgggaatgatagaagatgaagggggagcagccacaaattagagttttgtcttcattttgtgtgtgcatgtgtgtatgttcctggatctggtggaatccagagggtgtctcaattactttccacctccattcttgagataggattttttcttttttttctttttttcttttttcttttttgtctacctggagctcactccctgggctagtctggctgctcagcaaaccccagggatcctctcatctttgcttccccagctcttggattacagacatacaccaccttgcttggatttttacatggtttctgaggcactgaatttatgtcgtcatgcttgcatggcaagcacagtactgagctctctcccattgcctgtttgtttttaattttttaaaaaatatactattttaattaattatttgagaatgtcatacatgtgtgcaacgtatcttgattatcttcacctcccacatttcccgtctcctctcagatcaacccctacctcactagctcctcccaatttaatattctttttttatttttttaataacctactgagttcatttagtgcagcccatgtccttgggtgtgtgtgcccatccactggagcatgggcaacctaccagggtagataccttaacagaaactgactattcctcccttagcagccatcaattgtcactggctcctcagcgagagacctcagctccggagtccctccctccctccctccccgttccaggctgggattgacttggtcttgggcaggcaaccacagctgcttcaagttcatgagtgaagtagtccattatgaacagaaaacagttttgctccagtctccccagccttaggctcttacaatcttgctgtctccttttccactcactatcttccctgaatcttgggggggatgtgatgtgatgttgaaatcctatttgtggccgagcacgacacagacactcattctctacacttgatcagttgtgagtttctgtgtttaaccactgtccactgcacaaacagcttctctgatggagtctgagagctgcaccaacctacggatttaggttatggctgtagccaaccagtttctaattggatttaagactcgctccacaggaggaaaagcatgttaagtattgtaaatctgaccaagaacccatatttggagagctcataagcccagagttgaaactaatactattcctttgctaatgaaaatagcattatattgtcctctaaatttttatatttgtttttcacttttaaaatgatttaaaatttttcttagttagcaaacaaaataatagattcattcagactttttaaagactcatttaaaaagattttttgttttgattgttgtttatttatacatgtgtctctgtaaatgtatgccatatgtctgggtgcctacagaagaaggtgttggattgtccagagttggcactgaaataatgggctgttgtgagccacccagtatggatgctgggaacttagctggtgtcctctagaagagcagggagctctctttaccattaagccatccctcctgcccttttaaaaatgtttttttatacatgaatctcattgccctttgctcagactcactacctactcttttctgccttccctttctgatcttctaggatctggagagatgactcaatggttaacagcactggctgttctcccggaggacacaggtttgattcctagcacccacatggtggttcattcataaacatttgtaaccccatgccccttttctggcttccacaggacccaggcaatacttggtatatggacagacatgcagacaaaatacccacacacataaaataaaaagtaaaaataaaatttaaaaagagatatatcaatcccgtggcaagttaactgtaaaactaagcaaacaaaatatgggataattgaggaaataagcatactggatatttgctgacaaaagaataataattattgttattattattatattttggtttggtgtttcaaggcagggtttctccatgtagtcctggctgtcctggaactcactctgtagaccatgctggcctcagactcagagatctgcctgcctctgcctcctgagtgctgggactgaaggcatgcaccactgctgtctggctctaattattgttatgtttaacttagacaatatgatagtattatgggcacaaatagaccctgtatcagccacagaactgctatggtcccaccaggactctgatgtacactgagaaagcacaggcttagagccaggattgaagctctaaaatggctgagcaggatcaggatactgagggcattagagcccttcaagtaggagtggcttaggggctgggccatttccttcttcattattccactggatatggtgaaggtctgtctacctgaggtctcaaaggccccagtagctagaaagctgacacctgccagatttgggaatctctcctgcacaaaacaccccaaaagaagtctgtaatctctcctacacaaaatctcttcaaaggaaacactgcctatgttgcaatggtgctccagaacagtataataaggaaggccttttggtgggcatctggaagaccagaatgctgttggagacacagacaagattatgcttgagagatttcacaagaacaaaacaagtagtctatcagaaaccagtctaaagtcattcatgttgtcatactctggccaagaacctggctgcttccgtggcctagaaacctgatcaaggctgattcaaaaggaatgattaagttgtttgcagaaaatctcagtgctcaggctgtgttgtgatcatggctcacataatgctggtgcagagaaagtgtctgagattcttagagggataagtgtcattaactagcagacaccctgggacaataagaagtaggtcttgaggcaaagatcccacccatggagagctgctaagtgtagcgatgcaaattcacttgaaaggagagttcctgaaaagttagagcttaaagatagcctgctggagtgattccccagggtaaatcttcaaagcctcctgaggacctgccacagaggggtcgaggttatagctcaagtggagggctgaacttggcttcatccttgtgctgctgattctgtgagaatgcaggattcaagaaggagggacgctggaggcctgcacggaagattcaagaaagccactgaagccgagcattgtgtgtctggattggattccctacaatgaggtcctcagaggttagtgctcaaagctatgaagatgaagcctaagttgcagtggagaccctaggttattggagatgtcagaaacagggggcatttcatgtccaaaagggagtctacagagcttgagggcagggccatgaatggctcttagagtccctgtgatgccaccaagagctcaggtgcgatgtggagctgtatgatctgcgtggctctgttttaggtcttaccttcatatagccccattttttcttttaggatgagaatgtttactctgagttattgtgctggctagttttatgtcagcttgatacaagctatgtcatctgagaaaagggagtctcaattgaaaaaaaaaaatgcccgcataagatcaggctgcagccaagcctgcagggcattttcttaattaataattgatgtgggagggcccagtctgttgtgggaggagccacccctggcctggtggtccttggttcaataagaaagcaggttgaacaagtcatgaggagcagcccccatccacagcctctgcatcagctcttacatccaggttcctgtcctgcttgagttcctgtcctgacttttttcagtgttggagatgtggaatgtggaagtgtaacccaaataaactgcttcttcctcaacttgttgttggtcatagtgtttcatcacagcaataaaaaccctagctaagacaggtactgtatgttggacgtgttagttgatttttgattttacaggagctcacagttgcgagtctgttttgagtctcagaagaaactttggacttttgagcagtgttcaaactgttgatattatggggacctttcaataaggtcgggatgcaatatgcattataaggtgaacataaggctttataggtcatgggtagaaaggtatggtttaaagtgatttgtttgagtgttgagccaagaaagggtgggcttttatttagttttattttgaaataaggtctcattctatagcccaggaacctgctgtgtagatcaggctggcttaaatctcacagagatccacctgcttctgcttccagagtactgggactaaaggcgtgcaccaccatggttgtcttaaaggtgaactggtagaggctaatttttattgtcaacttgatgggattgggatatacctagagtttcagtgaggcacagtcttgggtttctctgtggggacatattcagagaggattaacccagggggaaaggcttatccttaaatgggtggcatcatcccatgggcaaaaggctaagaatgaatgaaaagggagagaacatcagaaaagcataacccagtggttctcaaccttcctaatgctgcgaccctttaacacagttcctcatgttgtgtgaccccccaaaccataaaatcattttccttgctacttcataacggtaattttgctattgttatgaatcataatgtaaatatctgatatgcaggatatctggtatccaatccctaaaggggttgtgacccacagattgagaaccacttaactagaacttgttaaaccccatggcttcaggcatagccctaataaactccataagcacccatttctccctgcttcttgatttacattggtgtgaacaatcaatctcatggactcgctcaaaccataagtaacaagaattagtttctgcaaaaataatgaatgagcatcaagaatctggcttatgggggatcttctggtcaaatatctcacaaagcttcagtcaaagggtagtctaaagctatgattatctgaaggcttaaactgggagaaggtgtagttcagagtttattcatgtggccattggcaggcatcaaatctgcttctagattcactcgtgtgagcctcttcatgctgctgttcatggcccaaggcttcttccagagcagaagcccagctgagagcatcacacagtcatgactttggaagtgaatattcctcttttctgtctattccattgttgagaagggagtcattaaatcttccttggtgatcatctcatagccttttctctagaactttacagctgttagcatggacatctcacatcttgggaccctcctcagggctgggcaaaccagtttgattggttatccccaattcagtgtatcctcaaagggaagtccacaaggatgtaggaggtggagtcaccagaggccacttacaaaaatcacatcttaatattcagttctctttattcttgttttgtctgtctgtctgttttttgtttcctagtttatctttattatatatgcatatttccctagcttgtcattatctcaaagaatgtatcaatggccgggtggtggtggctcatgcctttaatctcagcactcaggaggcagaggcaggcagagaccagcctgctctacaagagctagttccaggacagcctctaaagccacagagaaatcctctttcgaaaaccctgaaaaaaaaaaaagaaagaaagaaaaaagaaaaaaagaatgtaccaatgttggatgctagttttctttgttttgatttctagaattcttggccataataaaaatcttcccacaaaggaaagcttaggaccagatggattcactgctgaattctgtcaaatgttcagtgaagatctcctaccaatctttaatttgttccacaaaatagaaagagaagagacactgccaaattcattccacaaagcacaaagccagtactatcctggtaccaaaaccaggtaaagaaacaacaaaaactgcagatcgccaggcattggtggtgtatgccttcaatcccagcacttgggaggcaaaggcaggtggatttctgtgagttcgaggccagcctggtctacagagcgagtgccaggataggctccaaagctacacagagaaaccctgtctcaaaaaacaaaacaaaacaaaacaaaaacaaaaaacaaacaaaacaaaaaacccaaaaaacaaaaacctacagaccaatttctctgatgagcatggatgcagaaattcttggcaaaatacttacaattcaaattaaggaacacattatgggtaccatacatcaagaccaactgagcttcatcccataggtggaaggttaatgcaaaatatgtaaatcaatgtaagacagcgtgtaaataaaccaaaggacagtgaactctaaaagaaagaagtaggaaaagtatttcattcataaaagagttcttggccagatttataactggccaagtttctattttgaaaatatttactgttgttgactctaaatacaaacttcattttacacttcttgtactatggaaaagtaaagagaatgtaaaaacagtcttttgcctaattctgtttttatctttcacgctttgtatttgacattacacagcttgcaccataatacaactttggatcctgcttcctgcttctttctgttgctattatgagcattttccatcttagtacaatttgtccattgatgtatttattcacaaattcaagtaatagctcttcatgaaagcaccaatttctattcaagtttcttctactaaaagtagacaaagcagcttcataacctgtagttggctttttctttgagttgccactcagctcccaaataaagacacagagacttattattagttatgaatgctgggccctatcttatgcttgtcccattatctcttacaacttattttaacctgtttctcttcatttacatttttcctttgggctttttatgattctttcattctagatgtcttactctatatctgactggctgtttggccctgtgcatgcatgcatctccctccttttctcccttattttctctctctctctctctctctctctctctctctctctctctctctctctctctctctctctctctctctctctcattcctccttatctgattccctctggctaccagccccacctaatccctctactgcctagctattgtggttcagcagctttttattagactaatcagataccttaggcaggcaaggtgaaataataacacatctttaacatacttaaattatgttaattaaataaatgcagcataaataaatgtagccatctttgcctaattaaagtaatatttccaacaacaaccagagaaaaccagaaggtgaagccaagtgtagcatgaattctttttggtcttaataacaaaaatccggagtcagatattagacagggaaacctgaaagatcagggaagcaaagaagccagtcactagcacttacctctacctcagaccaaatgggtgatcctgtctccatgaatccttagactgaatcctcagactgtctgcctcagactgactgctgctcagactgcctagactgcctacctagactgcatctctctgtctcctgtcttacattcctctctctgcccagccatattactcctgttcccatttccctactgctgggattgtgtgagctgtttctcgtcagacagattcagtgtcatgtagacaagggtggttttcaactcacagagatctgtctgcctctgtctcctgagtgctgggattaaaggtgagtactgccatggcctggcctttatggctaactagtgtggctgttgggattaaaggtgtgtatcaccgctgcctgacctctgtggctgattagtgtggctaactttgaactcagatcttcaggcaagctgtatttgttagatcataaacaaagtatcaccacagctaagttctgaattctggtggttgaaagtgagaccactgaattctggcaagggtagggacatagggctgcagtccagtgaggtgttaacagtccctcttgtttttttcagtgagtaaaccagaagcaggaaaacataaaaaaagggagaccagctcacacacaatttcagtggtccaggtgagagacagtagacttggacaaggaggtgactgatggagatgaagagggctctttagacttatgttgaaataacatttttaccttggtgatggtttgaacatggggcacaagagagaagggaaacttgggtgatgtttttttaaagtgtcttcggtgatagtggtgccattactggtatgtgaaaagtaggagaaccttaggtttggatcatgtattataaatggcatcagttgcctcacctatgtgattttccccccctgtgttactgaagtggaactgagcatgtgggtcttaggttccactcccaggtgaagtctgaaggatgtgtgtaacgagataacaagcaaaggctgtagccattttctagggcatggctaccatcatgttggactatggttataaactcagagacagagaagtgaaggaggagtgggcagctgggcagagaccagatactgagtccacagtgaggatcagagagagtcagctggatgaattggagggtgtactctgattcactcggcacctacagcttagggtacacagcaaaagcttagtgaggattttcgattagttaggtgattgctgtgatctgggtaagtctaagaaactaaggacctctctctagtaccgtttgttgatttgagtagggttttttttgttgttgttttttcttctttcttccctccccccctccccctgtccttttttttttgtttgtttgtttttgtttttgtttttcgagacagggtttctctgtgtagctttgcagcctatactggcacttgctctggagaccaggctggcctcgaactcacagagatccacctgcctctgcctcccaagtgctggtattaaaggcgtgtgccaccaacgcccggcttctcccatttctatgtagcataggctggtctctaaaaacaatttattatcttatgtatatttatctgtgagtgggtatgtgcatttgaatgtggatgccagagatattggacccccctgaagctggaattgagctgcccaacgtgggtactgggtatggagggcagtagtgctcttagcctggccatggagccagctttccggcccccttctctaactcatgctcctcctgtcttcacccaccaaggggtgggattacaggtgtgcactgacacacttgcttgagtcatctttttttaatgtttctaccctattttctccactttcttccccatgggggtcagggtttatgagcttccctgcctctagtgactggtggaaagtgctcgaggttgttaccgatgacaaatcctgcagtcacactaggataggccctcaggaagctgggtggatggatcatgggctgatctagacatttcattcattagctttattcatttacttatccatctcttcaacaaaaccttgctgcacacctactatgtgccactctcaggttcttggggttgttagataccaagatgaatggagaggtaaatgtccataaaagcttggctcattaagctgctacaaatagcacccgagtcgctggtcatgaactttttggctctctgcccttcatacacagttatatagagatgaaaggaaaggaaaacctttattcttttgcctgctgtgttgttttaaaattttataaaaatgtacaatgctctgaagaggcccaggcagaaataaatctttctatggtgtctaaaaatggacagcctcatctctctagaagctgctggggggtcagcagccatgccccacaaaggcagcaggcagagtctccccgttaacatttttaaggccactgtaagttatttatttatttatttatttatttatttatttatttatttttttagtttggttgtgctcactgccaaaccttcagaaactgtgtatttgcgatttcccatgagagacagggaattttggtgaaccatgtcagccatctattttaccttcctacatggtcctccccactccaggcaatgtgtgaagtcaagttgaggcaacaggattgcagatggtcatggtaccctgccctttcctctgcagtattcaggaggttggaggggccagtctcatgggtgttaatgagcagtggtatgtggcgtgcatagctgaagtgcaacctattcttgtttggctaatggattcttataaaccccatcaaggctgagattgtatttcggcacctgctatagacccttgtaggtactcaataaagatatatgttggatgactacttgagtaaatgttcctggagaggactgagctttgcaaattcttacagggttgactcctttaatttctctaaagataaacagtaacacctcccctccccattcacactcaacacagcacgattctgtgacaagctatgtatgtgtgtatggttttcttactcaccatccaggtctccagcatagctcagctgggtgtcctctagatccctcaggttgagagctttcataagacagagtccccgacttcagataccccttgcaagtagcaagttgcctcctatactttgaccagcttactttatattagagttcttactgtccttctttggacttgattaatttgctagggtggctcacagaactaaggaaaacacattcactggctttatatttatcatatatttataaaaataaaggaagctataaaaaaagatatggcagaagggacatgaagcttccatgccttctgaaaggtgttgtcacctgggatgtccacaagttgagtcatccacatgcccactgaatcttattgttgaagagtaaagtttatggaacccgattcctatacccttgtcctctccctagaggtcagtggttagagccgaaagttgaacacatataacatgtataattatttgctgggccctgtgagaagcacaaaagtcgaccagtcaaacacccttcctaggtatttgatctctttggcaaggatcttagctgtagactctaaagaaactgctccaaaaaactggatcggtcaaacatgatagacttctgataaatgttctagtttatcagaacagcctgttcatgtcatgaaacatttaccaagttgcttcaggaagaggagggaaatgcaataattaggttggttttctaccttacctatcctagtaaagacatgattaaatatttattgactgtattgacacccattgcagtgtttgcaaaacagtgtcctggaactgtggccagggagggacgtgtttagagaagctgttgtattggccacaaccacaagctaggaagatgggacccgagactttccagttgtgcttaatgtgtatttaccttaactgtgtattttctttatatccagtacctacttgggattttttctctttctctcaagtcagtctgatggcttggcctgatgggagtatagcagtttaccaagtttgccttctataatattccctttaccgtagtacatttgggggtataggcatgaggacagtcacatttacagtggccattaggctggaaagaacattgcaaatgaacagctgtgctctgtcccagatgtggttggacattctcgaaggagaaagcaaaatgactatcggtctctggtgtgtatatgagattctgcacaacagctgttactattttcactgccaataattaaaagtactcactgatggtaggtgtggtggcctttgatcccagcactgggaaggcagaaacgaggagttctctgtgagtttgaggacagcctggtctccatagtgggttctagtacagtcagggctacatagacagactctctctctttctctctctgacacacacacacacacacacacacacacacacacacacacacacacacacaatgctcattttcccatttgtgaatgttatctagaaaggaaagggtatgcaatttgactagttatgtctgtagtaaaaggaagaaggattcaaagaagattccagagttcttgccctttggttgaaaaaatatctaagaaatgagttactgctgatatcatgatggtggatacacatggaggtgatgtgagagatggcattctaacatgtttgtgtattgtcaggattcattatttaaattcaagataggtgatttgtttgatacagatggcaggaatattaaattcaccagattgcttctttgttttttcagatagactttcgtttattattattatttattgtgatggtggtgttgggaatctaaccaagagccttacatatgttaggcagggattctatcactgagctataccgtaggccccagatcacttcttaattaagtgttctagtgaaggaaaggcattgttattcaactcaccggtgtcaggtctaggtgcatcattaatcaactaaccagtgtcaggtcttggtatattaataaccagaacatcagcaaggaggatcatgggaagtggatgtagagactcctacctgatcgttttagccaggtatttcccaatttgaggattgctaatgtggcaacaccaagttgacttaaactctctttgctttctcttcactaaccactgggcatgtgggtcaaaggtgaatgaatacccaggaggtcatggaagaaaggagggacaggggttattcttttcttggaagccattgtttgtgccgttaatgatcagtgagtgatggttaccattcagaattgccttgttcttccctctcttatgctgttgatttaaggttctaagtgcatttttgttgttgttgcttttttgttttgttttgttttttgagacagggtttccctgtgtagctttggagcctgtcctggaactagctcttatagaccagcctggtcttgaactcacagagatctgcctacctctgcctctcaagtgctgggattaaaggtgtgtgccaccactgccagatgtaaatgtattttgttacattgttcttttttttttttttttggtttttcgagacagggtttctctgtgtagctttggatcctatcctggcactcgctccggagaccaggccggcctagaactcacagggatacacctgcctctgcctcctgagtgctgggagtaaaggcgtgcgccaccaacgcggcccattgttcttaatattataggcaactaaggtgtcattgccttcaagaatgtgcatggataatcttagctatagaggaggccacagcaggagaatagcaagtcaaggcaggctaggacaacttagagctctgtctcaaaataaagaaaaaaaaaaggaaaacaagggttggggacaattttcctggtagagcatgtacctggcacatgcaagtgaggtgaattcaaacccttgtatagaaaaaacaaaaaacaaaacaaaacaaaaaacaaaacaaataagaatgaggaagacagccgggcgttgatggcgcacgcctttaatcccagcactccagaggcagaggcaggcagatctttgtgagttccagaccagcctggtctacaagagctagttccaggacagcctccaaagccacagagaaaccctgtctcgaaaaaccaaaataaaataaaataaaataaaaagaacgcggaagacagagaatgttctcatggaattttgaaccatcctctaaggagaccttgtcattgtcatttgcagagattctgatagttcaggtaaccaggtctagccttcattgagaaggcattcagtggtgatctacttagcacatggtattagatacaaattcagtggtgtgctatattaggctagcctggatgactcctttttctgctgtattcacacatacaattacctgccttggaggagaatgctgatggcctgttcttaaacccttggatttttcaagacgattccatggcctcttggagatcagctccagagaactggcctggaaacacatgccctgtgctttctgtgctagatctgactttttggtatttcctgctggaacactgcttgggtggagttccctttggaagcaccagggttttcctgtttgtgcagttgatttccaaaaccttaaataaactctgttgtgtgtccagaacagtaacaactccacagttcttgattaagtacctactaggggcctgcctttgttctaggagctagataccatagtgacctccatagccccttctctcaaagggctttcagtctggtccaggactgagattagtaaacaggcatttgccttccacgtgggaagtgccatgcaggacaaagtacagagttggagatgggagggagggtgaatgaaacctcagaaatgtcaggtcttgaggacgggtacagtgtgcccggcgatacttgccagaacatgagacaactcaattgcatgctaaatataaggatttgatttttctaaaaacttttctcaattaaacgcaagtaggatattctagttaattttcagaaaaactcattccccaacaagtcattttgtaatggcttaggcatctccacaacttccaacttcactgcaagtgaatgcaaagtaataaactatgaagtaaataaatcatgaaggcaacagcaacacactcaatagcctgcttgaaggaaggctcacatctgggtgagaggcaagcagagacggaaataggcaaggaaagtgaggtgcttgctgaatcccaacaaataggtccttcattatttcattagaaatgcatttggacatatcaagtagataagttattagttatatataggtgacaaaacatgtcctggtgtcacttgatataaattacttgtgctttactttgtctttttctggacaccccctttcccattattgcagactaacctcttgccagaataaaaactagagggcagtaatagatgtaaaggcttctgtatgtttatctagttggggtttcttttttgttttcctttttttatttgaattacaaataagattgaattacataacaataccagttcccttctccctcccttcctcccctaccacccccccaactaaaaaccttacctatcacatatcctttcaactaagggcatttttttttttaaatctttttacttattcaatacacagatcactagtcactgcattctttaacttggtatgaggcattttgtgtgcatatttatttatttattatttatttatttattagttctagttagggaacaagcttgtttcccatgtaagtcccttccttctccctctccctcccctcactccctcttctcccccacccccagcctatccccaccccatccacccaccactccccaggcagggtagggccctcaatgggggctctgcaacgtccaccaaatcttcctgtgctggtcctgggcccttccccatgtgtccagggccagagtgtaacccttcacgtgggatgggctctcaaagtccctttttgcaccagggaaaaatactaatccaccaccagaggctccctggagtgcagaggcctccttgttgacatccatgctcaggggtctggatcagtcctgtactggcctcccaggcagtatctggggtcgatgtgctctcccttgttcaggccaactgttcctgtgggtttctccaacctggtacagaccccttcattcttcattcctccctctcttcaactaaattcccgatttcagctcagtgtatatctgtggatgtctgtctctgcttccatcagccactgggtgaggtctctagttcctgggtcggttggcggaaaagcctagttggggtttcttatgattattcttgtatatactgtgtgtgtctgtgtgcgcatgcacatgtgttcgtgcatgcatgcatgtgtaggtgcacatgtatgtgtttgcatgtgggtgtggagaccaaaggtcaacctccccttgtgtgtagttcctcagccatctaccttgctttctgagacaaagtctctcactggggcctggagctcatcattgaggatggctggccagtgagacctagggatcttattgtctttgcctccccagtactgggatggcatggtgtactccaccatatctgacatcttgggtgggtgctggggattgaactcaggtcctcaggttttcatggcatacactttactgactgcactatttctctttttgatttcggatcagataacaaagtgcactgttactcattttcaaacatcactttattgtcaggtgtggtggtgtacccctgtgattctgaacatgggaggctgaaatcaggaggattactatgagtttgagcctatctggggtagcagattgtgaaaccctgtctcccccaaatcgctctataggcctacgaattttgacacagtataaccatcactacagtagaggcttgaatgctgtcgttttttgaagttgccttagtcctggctggaaacacctactgacctgcttcctgcctctgcagattgacttttttttctcccttaggataaaatacttgagattcttgttctggttcagctttgataaaacctttcgaccaaaggtaacttaggggaagaaaggatttatttcagcttacacttccagttcatagtccaatgctgaggaaagtcaggggtttggggcgggggcgggggggggcagacttgaagtagaaaccatggaggatgttgcttgctgtcttactcactgaatgctcagcttgctttcttgtacagcccagctcaccctgactaggaatggtgctgcccacagtgggggcttgattctcccacatcaatcatcactcaagacaatctcttatagacagtacctcagttcaggttccttcttcccaggtgactctagattgtgtcaagctgacaatcacactaactagtacaatcgttttatatgtagtttttttaaaaaaaattaattcaaaacactgatttttctcaagtagaaagtaattgctgaactgcttagaaagataaacagttgaaggaagtccctctagcccaagaattctacaatgttgtctaggaaagggaggcctaaaaattataccatgttagtccacatgtaatttaagagaagaacatgcacattcatttctgagctctgggagcctgggaagacaggagatgaagctactgtgagtgatagaatgtattacagaggctgacagcactatttgctcagttctgttatgagctcagcagaatgtgacagttctgagaaatataaatatatattgctctatttatatgtgtgtttgtctcaggagacttggcatggagtggtgggaagggtttcctgaagacagagtgggcagagctaactgggcaaagtgaagcctgttgatgcctagtgataagcacacatgacaagaactaatattgattgaacacttaagtactatgtcaggtcccgctcagctctttacgagcaagcacactttaatttaacatgaattcacatgctaggtagcaaatagttcttttgcttaactttgcatccttttgcaatcttcctgcacgccatggctacctgctgttgagctccctgcaatgcataggtctctgatggagcagtcttcaggctactggagcattctgcatcttagccaggacaggaaaaaaaaatgtttgggacttcagctgttagaaatggatacaggaaaacaaatgctcccagcttcctcctgtgtgattcaagttatcttctgctcccctctccaggaggctttctttgattctcaacattgaataaccctttcccctttctagtccctctccccagctttttatccaccttccctggaggacatgtccatccttcccgtgtccttcacttagagttgcatctggagaaccctgttagccgagtcactttaccggtgggggaacgaggaaggtttattcctatctaactcctgctcatccttcatctgagctttactcttaggctgactttccactattccccacagcctaggccaagtgtctggcttattctctcaatcatcctttgttatatatcacagtattgagtttgaaatcgtccccaaaccagatggctggctccaggatatcaagggccatgtctactttgttcttagctgtatgtttaggatcctgccatggctttgtgaacatagtaattgctcagtaaatatttaccagttgagcaagtgagttgagcttccttctgttttctcacccacctcttgagtaatctttcacctctgtaaggactgggccagaaatgcatagagaatagctcttgtgattgacattagtctgttgcccactgccattcttcagggtgtatagagaagaacaatatcgaggtcaagatgacagaattgctccaggggaccaaagttttagtgccaagtggagaaaagtggggagagtctgagtgaattattaggaaaaaatctgaacatttgggtagcattcccacttcatacacattccgaataaagtgttcactcttagatctcactactttcccaccaaagtgcatttagtctgatgttctcatcgggagttgttaagtatctacatcaccttcctgccatggtaatttcccacctatataaattcacaaactgcgttggaagcatttgtggagaaagttaccccggctttttttgaggttgttcattgactgagagacttcccaggcacacacacactctccacacgaggatgttttggctctgatcaacatggaagaatcttcctacctgacagttgcctgtaaagtcaagaagtatgtgttaacagtcaccagctttcgactgctgttcagtgctgtcactggcaatccttcgtctgccaggatgcaggccctgaaggatcttggcacatggagatgttagtgcttagcagtgaagtaaatactgccatgttatatgggccaggtggctataagtaagtcatgacatcctcaggggaagtttgcctctagagatccaccactttctattttacttttgtttactgatgggctgataagaaatcaatgacttcacatcttttgagacaagtcaaaacaaaagatctttgtaaatatgaaaacttagaagtatttggaggttagtgtcctggatagttttatgtcacatgacataaactggtgtcatttgggaagaaggactctcaattgagaaaatgcctcataaaatttgcctgcaggcaaatctgtagggcattttcttagttggtgattaatgtgagaaggcccagcccactgtaggtagagatatccctaggatggtggtcctggggtgtataagaaagcagattgagcaggacacggggaacaagcaccctagtaagcagccctcctctgtggcctctgcttcagattccaactctgggattttgctttgagttcctgccctgacttcccctcattctggactataagctgtaaaatgaaataaaccatttcctcttcaagttgcttttggtcatggtgtttatcacaataatagaaccctttaatgatgaagggagtatacttgttcccacagaacttgattgttgggttaggttactgaacttgttccttctgactttatcccttgtatttctgtgcatcagtatttgtttggaggtgtcaatcaaaccaatgtctttgtatgtgtagctcttagagcctggatagggatgtgttacactcacctaattgtgatggagttgttttctggcctttcatccccttatgaagggctgttggggattattatgttaaggtgtgctacttttgtttatactgcatttgtttaactctgtgaagctgtgattctttgcccatctaaaacacctgatggtcctaataaagagctgaacagccaatagcgaggcaggagcaagaataggcagggctggcaggcagagagtttaaatagaaggagaaccgaggtcaagacgagaagaagcaaaagaacaggaaggaagaggacttcaggggccagctggccagccactcagccacccagtcacccagccacccagccaccctgccactcagtgacacagccacccagccacctagctacccagtgacacagccacccagtgacacagccagacagggaacaagaaagagagaaaagggatacagaagtaagaaagataaaagcccagagggaaaaggtaggtgggatgattttaaaaataagaaaagctggctagaaacaaaccaagtgtaaggtcaggcattcataactaagaataagcctccatgtatttatttgggagctgggtagcagaccctcaaaaagtaacaagagtaaaacttcgcataacaaaggcatctcgactaactcttgttctgctgagatgaggcactttttcctatataaacttgagtgcttgcatctgtttaacaaaataagactgttctttagggagtcactcctaattccctgtgtccatgctgaagccagagtcaatacttcactgcaacccacttgcccacttgtgacctcttgttacctcccaaagcatcttaggaatgaaggctttgttgaaatgtccacaagggagaaaagttgcgggcttctaccaaacaccatgtaaccaaatttaaatccccactaaaagtgtccgttcatttcaagagcaccatctcctcttgcctgctgttgccctgtttcctccaaatttccactagccactggatacagcctccttctctctggattcctcaccatcatttagcattttagttccctcagccctccttcattatcttgcttccactgaagttttagtttctgttcaccaaagtatcacttgttatcaatccctcttaaaaggcaaggtcattatacatttatactctcttgccagagactggaggtaaaacttaagggcagttttaccaggtttgtgccttatataccattaaaaaaataaagtcttttccttgtcatatactctggctagtctggtacttgttatatagcccaggttggtcccaaaccaacggcagtggtccttcttctggtactggaataacacgtgcattttcattttcttgtttaaggttcttctacatcattctagcttctgctttggtctgcagccatttctgcctgtctccatcactctgctcagatatatcagttcactttctatcaaacccacagtgtacagcctaaggctctggctcttcattcgggctgtgtctcagacctgtagtgatttaggtcattcctgagtatgagtggtggtggaatactatcattctttaaagattaaggtcaacacagctgcttttgtagacccattcaggttctcccctctctcccagactcagcattgatttctcttgctcagcatacttcactaggttttccagcatagacataataattcattctttgttgttcttcataagccttaatgtatccactctgagggaacttcatcttttggctttgcactgttgtggttataagccttccaactggaagccagactattgttgttattaaggctactcaccatagttttttgttttgctacactacttggcttgtggtgtgtttggacttctcttatcccttcatgttctgtgtgtttgatttgttttggacataagtggaagcaggaccatcatgagctcttctcgggaagaagctattgggagaagatgggttcggagatggtgagtgactgactgtgctttccttctcaaatgatcattgacagtgcttaaaaggtctgacaaacaggttcaggaggccttgaagggtgcatgccactataggcaggttttgagagtttaaatacccaaggcaattctcgttctctctgtttcgtgcttgtggctcaagctgtgagttctcagctagctgttccagagccaggcttgcttcttacttgcttctcaccatgagggacttttctctctctagaatactcaatctgtcttcttagagttgtcttggttttatcacagcaacaaacaaataactagtacagtatccctgactggattggaagtcactatgtcgcccaggttgccttgaattgtcttgcaagtgttggggttacaggtgtgagtcgccacacccaggcttgagctttactggtcttctggcccagtgagcattggcctacagatggacacactgtccccagctgagtcccagaggccatctttcacctcccccccacacccgtgtagtagctgtatgatatggtggtgtttgtcgatgccctaaaagtgcttatgtaactagtttcttcagtcttggcaggagctctgggcctgaggcgagaaagggtgtttacattctacaagtataatcccaagaatgccaagtctcagggctgctccagctcagtgtcgtgcccccaccacccccatcaagcacctactttgtctctggaaccggctgccactgccttaaaaatcagtattggacatatgagaaactaggctaagtataataaggcccactttgaggaagcatttgattcctgcctcaggtactgcctggatcactagggaaggagaggatgcttcctatcctgaggctgccccggagccttgtgcctggcacaaagcgtggaggcaagtgaagctattcgacagccactcactgagtcaataaactgtgaaaatatgtgggcgagagaacagtttagagtacatgttagtagatgttcttaatcaacacctaagagacagcttgcactgacccacacttgcgttcataataacaatggttactatttactcaatggggcacattctgtttccttgaaccccataagagaggccaattctgcaaacaggtggccttttcccagttaataactgagcattctcagtcatcagcacaaagtctgaggcacttgcctgatgtcctagggacagtaaaacaggatgcgaaagccaccctgcatagagtactctttgttcttctcgctgtccttgatgcctgctgctctctttttcctgcaatggggcaggactgggttcccttggaaggaggcatagagaggcctgcagggagggaggcttgggcagttcgtgtcacccatttcttttgcagcaggcatgaattcaactgggaagatacagctgcctgctgggctttatttcagcactcccacctgagttcaggcccttccaccgctcagtcttctgccccctcctcctagccaccccagctgtggtcacacagctctcctcttttctttctgttcccttcagtcctctggtttggaggccgtgtttccattttgcaagacaaaattcttgcttcaggtactattttacgaacagacgcttgcacaaaatcagtattggattgatgcattggatcgtttgctaaattctagacagaagatgaaaaagctttggatccaggaaatggaaaagttgggggcgggggcagtgtgtggggctggggcaatgatcttgactgttcccttaagtcttctgtcctctttccctgcccccactcccaccggcacctcttagcgcaggcgcggtctctgcagcttagttagtattatcgctgtcatccgatcacagaaacattcaaacagactgaaaagctccaatcgaagccaaagcagaagtatgcacacaggggcctgtttccttggaagtgcttcagttgtgattaaactccaaagaaatatgccaacaacccccttgaccctccagcgagaaacagcgaactgaactccaaggaccagaaaggcatctctggagtgccgggtgcacacgcctgttccctgcttttgcggccactgtccgcagatggcttctgcgcccgctcgggttggcggctgtgcctgctgctgccgggctgcggctgagatcattctgttgatcttgttttacacagcgcagcccggcacaggctgagtacagaatgttctcttctgtgaaccgagcttgaactcttccagcccactttgtttgaggagccacacagacacagagggaaaagagcgggcagataaccccaaatcgtggaaatcgtggtgttctttgggatttgggcttaggccatttgcttttcactgcctgaagtgaaaaataatccccccaccccccaagccttgcttcttgctttcccggaagagtgaaacgcccgtgatgtccttcctcttaagacttggcaccaactttggaaattaacaagtctgtcactgtctctcttcaatttctttttctcctcttaggcattcacggaacaacaacaatatagttggtttcctataaaggaaagatgaggtccctggtgcttgtgacttctccctgggttgtggaagctatcacagtattgtaaattgtgttctgtgacttattgctatggctggagggatgtgatggggaaggcttctggccagcggcctttatacaaatgagccatgaaaaaaaagctgtgaaatgtttaggagggtggcacgctctccctcactctctccctctctccctctctccctctctccctctctccctctctccctctctctctctctctctctctctgtgagtgtgtgtgtgtgtgtgtgtgtgtgtgtgtgtgtgtgtgtacactagccctggctgtcctggaactcactctgtagactaggctggacttgaactcacagagatctgcctgcctaaaggcgtgtgccaccaccgcctggtttctcttgattcaggggtaagtgtgtagtttgagaacacaaatggtttgggggctgaaagatctcagagtgagatttctgtaggttagacagtgaggttcagtgtagtggttttccagctcgttaatgataataataataatctttagatagtaacagtactaacaataaattcaaagagatgagattctgctgttacctaagctgcttaaacttccagactcacatatagtcttcccatctcatcctaccaggtagctgggatgatgggtgcatagtgacatactaggcccctgctgctgctgaaaataacaatagcaattcatattatttttttgtttactaagatagagtcttactacatagcccaggctagccttttggtctgagattctcctgacccagactccttagtatgaggattacaaacacacaccactatacctggctgcaataatgaatagttttgatatcaatagattctttctttgcactcaaatttgcaaaacattgggtgaatcacacagcttagtgtgagatgtaggtttggattttccttttaggttggctcctggcacatattatagtggacaagtcatgtcttaggctcattagtgaaagggtcatagatttgtcataaatacaggagtcatttatgaccatcttgctgctgtactagtgacacaaattcttctcttgaattcacagttctgtcacctcctggtttgggctttctatacatctggcttttgttcatggtttccaaagatactctgctggttttaagatatttatttacttatttatttttgtgtgtgaatcatctagctagcccttattttgttatttatttattttgattgatacagggtttcactgcatagccctggctggcctagaactggatgtgtagaccaagctggccttgaactcacagaaatcaactgcctctgtttcccaagtgctgggaataaaggtgtgtgccatcatgactggcctatttatttatttcctattaacactatacaaagcttgcctctcttctccaggcttcaagagctgagataataggtatttgctatcaccccactgtcaaggagatttccatgtgaatattgttgcttctgacacggttttagttccaagagattctctgataatattttgtttgaaaagtcacatgtcacagtgctctcagagtattagctaactagttcattgattttataatcctttcttgaacaccggctatgtctaaattagtgatgcgggtttaagatctgtgagatgagctaggcatgttcactgtctccgaagaccttattgtccagtgggagaagcacacatgatatggaatatgcacacaaatgtctatacagctgaggacgctggcatgtgctcagaagaagtaatgaactgtggtggaagaagacatcgggtaccaggtgaagattcccatgtgaggaagctgaggccagagctgacaatgaaaggaaggcattatgaaaaccgcagatatttgtggtgatgagacttgcatggatcatccagcagttggtaagcgttctcgtgctgagtggtggatgctggtgtgtgtaggaagaagtgtaaaaatttttttccatgtagatcaggaatttccacttgtccttcttgtgcctttattaagtttttctgctaagtttgtataaaacctcaggctccctaacagtgttccaggcattcatgatgactctattgagactggcacttgaggtgactcatttgtcagtcctgagttgagtctgtggtcccatgctttgttgttgttgttttccttttcccgctgccaaggtctcatgagctctagtctggccttgaacacaatatgcatccgaggatgaacttgaacttctgaccaccctgcctccaactccaactcccaacccctgagattgcagtcacacattaccacatgtggtttatacagtgcttcagcttgatccagggcttcatgcctgctaggtgagcacacatatttccctccctccctcccttcctccccctctctccccttttcccctcccctcccctctcctctctctttctacagtgtctctctatatagcctatcctaacccccaccacccttctttctttctacagattctccctatgtagccctgactggcttgaaacttgatatgcagaccagattggctttgtactcatggggatccacctgctcagcttcccaagtgcctggattaaagacttgtgccagcatgcccaataccatcttatttatgagaagatcttgaaggattcttgagtcaatgaggtgactcagtgtgtgccttggtgaggtagcccatggtttagggaaaagtgaaagcctggaaacaagatgtgaaaaaaggcaatgttaaccacctgggagagttgaagacggagtttctatcccacctggtcctgcagctgtttagtcccaaataaataccctggctgatggctcaggcttcttattggctagctctctcttaattattaacccatttctattaaactatgtattgtcacaaggctgaggcttacccataatgctccagcatgttactcctctggcagctccatggcatctccctggtgactcactgagttcctcttcccagccttctcctagtctggtagtcccgcttacacttcctgcctggccaatcagcatttttttcaccaaccaataagaaaaacgtattattcacagcattcagaaagacactccccatcagagagtggatcacactggactgatcaggtgctaagagctggcaatggcagaaccagaaagaagatgacaatgggcaggttttctcactgaagtcactgaatcactcctggcctgggtgctgctggctggcttctggagtttgctcacagatggcaacagagagaggttttgtttgtttgtttgtttgtttggagacagggtttctctgtgtaacattactggctatccttgaacttgctctgtagatcaggctggcctcaaacacaaagagatccacctgcctctgccttccaagtgctgggattaaaggtatgcaccgccatgtctggcccagggagagtttttaatttgtttttgttatttggcacatagtcttactctgtatgtggcccaggctggcctctggcttgagatctttttgcttcaggttccagaatgctgagtttaccagtatttgccattaacctggccattaattaaggagattttgctaagaatagccttgtctgagatggtttcagttctaagagatttttctatgataatattatttctgaaaagtcacatgtcaatgcactattagaatattgggaatgagacaaggaacacaggatgaggactttgacctttctttttatgaagaacagatgatgagctttacagaggctgaaatggaggagtccaagggacccccacagagagaacttcacttttgagttcaaaatatgtacctggagtcaagagttacagaaacttggaattcagccacacagagaaaccaacaaaaggttgaatcataaatcctggaaggagagccatgtgcactatgtataagagggaaaacaagaacagtgtatgaccttatgaggctctggtatttaatcaacacccaaggaagagaagctaagaaataacacatttcccttttaacattttggtttttgaaacaggatttctctgtgtagctctggaacctgtcctggcactctgtagaccaggctggcttcaaactcacagagaactgcctgcctctgcctcccaagtgctgggattaaaggtgtataccaccactgcctgactcccctttaaatttgtattttttttttttttattctgtgtgtatgggtgttatgcctgaatgaatgtgcactacatggaaactgacgctgggccctctagaagagcagatgacagtactcttaattgctaatacatctcaacagcttctccctcattcatgtagcccaggctagccttacactcattatttagccaaggatgaccagctactgattgctgattctcttactcacaactcctgagatataggtttttatcaacatatatggctagaatccaattccatcagtgtgggaatgtcatatcagtcctctgtcttgtctgtttcttttttcttttctttctttctttcttttttttttaaccagcctcacttggctaggacctggtggttggtgtcttgtggtgatattttatgatctaacaaataaagcttgcctgaagatcagagtgcaaagctagccacacaaattagctatagaagccaggcagtggtggcacacacctttaaacccagcattcgggagacagaggcagatggatctctgtgagttcaaggccaccctgggctacaagagattgaatctgtctaaaagagaaacagagctcacacaaaggtgatcccagcacttgggatcacacacctttaatcccagtactagggaggtggagacaggtgtgatatggctgggcagagaggagtataaagtgggaggagagaagagagagaggcagtctgaggaggcagtctaggcaggcagtctgagcattcagtctgatgattcctatagacaggagcatccatttggtctgaggtagaggtaagagctagtggctgactgctttgttcctctgatcttccagctccccgctccccctaatgtctgactccgggttttcattatcaataccaattagaattcgggctacagtgtctgtctgagaagtcaaggaaattgttttctcccacacatccacgaaggctacatttgtcagcctcttctgttagttgactatgaaccacagtgggagatgttttatattcaggcccaggacacacatacaccaggacttgtgtaatgaaaacaaaaggcttcgtgaaacaggaactacctgattcttctgcaataatgatgcttttctactatattttatttcagtaaacaaagaggatgctaattgggttccatgaagttgctatcataaccactgatgtttttcaaagctacagcttgaaagagacagggtacaggggctatgttttctggtagtccattctccctctagtggttagaattgctcagaagagaccggaatcctataatgtgagcataacttgaggcgcactgtgggagagtttaaccattccctaggcttttcttgcatggaggcacttttagcttttggagggagtctgtatggaccctatcagcaagggtcttagtgatgtgcctatataaaaatgatagtaataatgcaggttatgcagctttatatgataaggctcaataaatgctagatgttggaacagatgggattttccagttggagtcactcaacctagaaagcctatgcaaatatccccagatctgaaaaactccaaaatctgcaacacatctggtccttagccttgcagggagggccactcaggctatagtgggcatttactgagtctggcacatcatatacattattaacacaatctttataatcaagctctaggggagagtttaattattaccttctttttacaggtgagaactaccaaagctaggagagaaaactcacccatgagcgctcaaccagtaaatgctaattcagtcagctggtcagctggtttatagactgaaggcactcaactgacattctaggaaagatgtcttcagcaattgcaccggtaaggtagattgaccgttgaccttggtccacttggggccctggcccatccctgtcactgtgtctttcagcaagcctggtcttggccgatggacctcttcccagctcctgtcactagaacctccttcagtttacatgttccttggatgcaagcaagtatctgacatgctttcaagaagtaggacagaaaacaaagcaggaaaggaaagaacagtgggagtacaccagtgaatgggtcccggggctggatggaggaggctgtctgcagtcacagagtctcggccttggtttcacctgacagcagctttctcatggactcccttcagcccgtctgtccagccacactcctgaaggtttatctttccaaagcagcattggtgttatcactcgctactttacccttgctgctgatacagtggtctcatcatggctttcaccctcccctcccctcccctcccctcccctccccttccctcccctccccctctcctcccttccccactccagggccttcaggattcaattctagctcttcagatcacagttgtcccatctctgcttcacctctcccactattcccctacatgaagctctgcctggattgtttttactctgtgtctggatgggtggaacctgtctgatctcagtgctgggcctatgtcatgtccctgcccataatgcatttcttccttctccctctccattcctgcccagtcttaaagtcaaaggtcagatctgactttcctgctatgctcccccagcaactctttctagtttcatgtatttttataaatatgttgttcatttagaaatagcacccaatgatgtagaatatctaaatgcttcatgttttaggccctcaaatccattcaaccatccatttgaaatgattttttcagattgtctattaaatttctgacatagaaaattattcaatgtcaacaagactaagaattggtcttataactccagaatctacagagagggctgtggaagtttgaatgataaatttcccctacagtgttgggtatttaaatgcttggtgctcacttggtggtgccgattagggaaacttaggaggcttggccttgcaagagaaggtatattactgggggtgggctttgagaattaaaactcatgacatttctaatcactctctacttcatgcttgcaattcaagatatgagctgcagttaggtaaccatgtctgccacttgctgccatgatggactcttagccctctgcaactgtaagcacaaataaactatttattctagaagttgtcttggcagggcattttatcacagtaatagaaaagtaactaatacagaaattggtatcagagcatgggctattgctgggacactcctgactatgctgctttcaggaggaacttggaagactttgcacaataaattgggttaaatgttgtaagcagagtttaatgggttatcctagcaggagcttagaatacagttctgagagcaatgtggactgggaggcccagctcaagaggttttagaggataagaatattagcacccgggcaagagaccatttctgtggtatttttggccaagaatctggttgccttctgcccttgtcttaagaacattttgcctgaggctgaattgagctaatttatttagcagaggcaatttcaagacagtgtaatatttactctgccccatggttataggtaatcactctaaagcaggtctacaatgaaaaagagcaagtggggcaggaaaaaaaaatgcacagtgtgaagagaaaaagagcaccaagaaatgaaatgttgcagccaaggtctgtgctgaaagagataaggagattaaggaaatgtctggtctgcattggaataaagggaagggtgcccttaggtcaagaccctacccatctagcttccaatttgtaaaacagagcttaaggatttgttgctataaagcaacaacaaacaaaagctgatactaatgtggttcatggggcctagggtccatcccaagctggcagccaaacttgtcagtgttgtccacatggtgcttgtcttaattacttttttattgctgtgaagataacgtgcctaaggcaacctagagaagaaagaatttattgggagcttatagtttcagagggtgaatccatgacccccatcatatcaggggacatgacagcaggcaggtatagtattggaatagtaaatagttgagagctcacactttgaatcaacaaccataaggcagagagagagagagagagagagagagagagagagagagagagagagagagagagctaactagttggagtttgaaaccccaaagcccaccctcagtgacaaacctcttccaaggccacaccccctaatccttcccaaacagtccaacctaaaggggagcaagtattcaaacatatgagcctatggggccattgccattctaatcactgcagtgttgtgcccaagtcacaaggatccccaaagagaccagagagacaaaccactgatgcgaatgcacaaggtttattaaattgtttatcctacctggggaggaaccccgtctagcaagctgctgatgaagcagcctccagagggggtgaagtttcctgtctactgctaggttttatttatttatttatttatttatttatttatttatttatttatcctgagaaattctctgatccttttatagttcaccattacagaatataccagtttcctataatagattcagtttatcaaaatagcttaagcttaacaaagtagcaaagataaggagctagacatacattataaagcatgcatagaccttaggtaaagggacattcactaagccagtggttcaactgtcccaacaggttttaaagacaaaagttacaggattacataagtaggtacggctggtttctgattggatctgacatttgggaacaatcaggaaaatttttcaaagtcatattttggcatgaaatacctgtgaaccaggtattctcattggtcggtactgagaaggaacattctgtggtttctatggctttctcttgttacttgcaggtggcctgttatacatagataccaatagtttttagaactgtatcctggagtctataagggaggttttggtctcccctggagtttcttttgtggccaaacagttcccaggaaccaagtacctaggaggctggggcgggggtgggggggggtggtgcagtttctttgtgttcagttttggctctaggctctgggaggccagaggatctgtagtttccttgggccagaggcctacgtgtcttttctgtagcctgtcatggctgctaaagcaggggccgagtgagggtctgttcccttcattcctggaagtgaagcctttgagtttagtttaccccttttatgcagtactgcatttaaagtcatgaaggatagattcatgagtaaaggggttgtggaaccttcctctgtggttaaagaaaacggctgaggctagccaacatgtagcaagggagtctctgcatgaagcctctgaaagggaaagaggctctgtgaggccattgcatgaagctatgaaaacgaacctgggctgcactggagattccaagatgttagtgatgccagagctgtgagagatctgtcaaggagagctacatctgaatagaggaggggcagggtggcagttgcatacagtaggcagcaaagctggaggggcagatccatctacgccctttgaaattaaagtcctagacatgagacacagttttgatgtttgctctcctggtttttggttttgctttggtccagtatttcctcactatgccccaattccctttgggactggtaatgtatattctttgccattatgtgttgtacatatgtaatttgcattttgatttcacagggggttacaattaagaagctttgagtttcagaagggattttggactttggacttttagaatagtatcaagatgataaaagactatgggtacctttgaagtcagactaaatgcattttgcattatgatatggccacgagactatgggggccagggaatgtgatgtggtgatttgaataataaatgttctccatagtctcaggcatttgaatgcttgttgtccaattggtagtaccgtttggagaggcttgggagttgtggtctttctggaggaggatttgagagttcgagagttaaaaaacttatgccttggggctggagagatgggttcagtggttaggagcacttgatgctcatctagaggatctacaattgattcccagtacccacatagtggctgtcaactgtctattattccagtcctagggtagggttccaatgccctcttctggccctccttgggcaccaaaagcctgtggtacacagatgcacatgcaggcaaaacccccacacacattaaaagaaaaaaaaaacaacaaccaaatatcctcaaactctttctagttcactctctctgcttcatgcttgctgttgaagatatgagctttctgcttcctgttcctaccatcatggctggcttgccgtcatgtctccttgtcgtgatggattcttatctctttggaatcataagctcaaataaacctttctttctattataagttgcccagatcatagtgttttgtcataataatagaaaaataccaaatagcagaaccaacacagtgagtagaaagctgttgtttttgacacccagttcccattggccatgcggaaataataccattatactttttcttttccatggtactagtgaccaactccaacaccttggccaatgagtcaagtgcaatactgctgacctattatatcccaagccctccaattttcttttgggaacatcttcctctaagtcttaatccttgtgtcgtgaccagggttagcttctatacatgagagctgtcattccctggccacttcttctggttgaaagctgagggtataattgcagccagaccagtgggaaacagccctgagttcttgctggaactgtctggagctgtagaggagtttcaggggagctctcccacattcaactgcaggagacttggtgaaaaggcagccacatgaaggaaattcaagttgagggacagacagcaacgaattctgtgtaacagctttgacgacttgcatccagccagcactgtaccttgtagaccatcaattctctttggtttaggtcaatttttctgggcctctagctcataactcagagtcctaactatcagaggactccttcacgatctatactgtgcttatgcttaactgcaagcaaataatagctcgaagcacattttgctggcacctgaaacaggtccccctgatctgattggcctggatggattcccagtctagcccttgttgcattgaaagtcaagattaaactgagttgatgccttactgaggtcctgggtattgatgagtggatgatttctgcttattcctgcttggaaaccatgatacttttgcctggtgctgatgtccagaagtgttgaatcttagcagaacctgatgcttcctatctggctgtgtcggcctcttggtacatgaagtttgctttacatctctcatgaaaggaggtgggatccttattctgatcattgtttatgataatgtgtctctaagcctatagtggacttataaaccacagtgctgggtagtgattaggtaacaataggctaagggaaagtgtaacctttattttaataatgctcctgtttgagtggtggccccaagtgtgtgttttgtcctgtgataaattcttacaaatgtaccagtctatcaatcaatggcatctctttaataaggagctagagacccaaaccttttattaatattgcatatccctaagccagtagttggcttaaaaaatactttcagagattaataaagtgtcatagctttgaagtcatttggaggtaaaaaatcaaaccaaatagagtacacattcttgtctcccaacatgggattcatcttcacatctgattcaaaaaatgaccaaatctttctcagctagggcagtaatgttttccctccctctggcatttagtcttggcttattgtaatattgtcaatagtcaggggacatcttagttttttttttttttttttttttttctatcgaaacaggtctaccttgaacaaaatcattgcctcactttaagtgtctccaggctgtttatgacttcctgtgcctgcatttagttcctggctcaggccttacatgggcagtccttgggctagccctaggctggactttctccagcaaaagtaaccttcttgctcaactctttctgcctggggaatctttggaaagtttcatatcctcactgaccccctttaaaataatcacgcagtgaaaccttagtaaaatgacttcagcaacctattaaggtagttttcaacttatgggtcataatccctgggggtggtgtgcatctaatgaccctttcacaagggttccctaagatcatcagaaaacacagatatttacattacagttcgtaacagtagcaaaattacaattatgaagtagaaatgaaatgattttatgttaggggtctccataacactaggaactgcactaaaggtttgtaggttgagaaactttgaacaaagtagagttataagaagccctgcctagagcccctcatctgtgtgagagatgactgggtaactggcctttttcctggggaggggttgtaattctaacttgcttggaatacaatcttttattcatattcttatcaataaagtgtagttcttttctgaggcaggacaacactctctcttgtgcatatatcccaggaatcattagacttcaaagatctgccaagagttccatttcttccagttgggagctgggaaatatagagcatgtctccctatcctagtagccctagcagctactggtttcagggcaagctcccaggcaggaccctctacctagaagatacattagaactgcctggggttttaaacatgcctaacacctggggcttacccctagtgattctgaattgtgtggtatgggctatatcctgatatcacatgttaaaaatattcctgaaatttataatgggttatagttgtatgatctgatcatgttactacaagaaaataagtatattttaaaaatccagattttgaagaacaggccaccatgacatagatttgactttatatgccaccagacattcttcttctccaatttcttttgctgtgatttggccagaacccaggatcttgtgcatgagaggcaaattctctgccactgagctttaccctgaacccctggaatactagtaaaccaaggcggggaactcttttgtttattttgtttagtattgggaaaaatcaaggtctacatcctgcttggaccatggggattgctgtaattggaataagactctgtggactcgactggtaatctaaagaagagttttctaaataggccttgcaaccacacccaccctgttagggacagcagggacatgcaggaggagatggcaggcaatgtgactggtggatgagggagagactctgtttccccatcgcaggaatcttatttcagtgagtgaattgacccagggctggctgcttgttgccaattgaatagttcctaatgttgctaaaagttttcttttttggggggtgggggtgagaggaggagatacacattaggatttatatgcagaacctctcaatttacagaatttggggctggatgtgggggaggggcgcacaactacaactccggtagagtctgaaggattcggagttcaaggccagccttggggccatgtagagaggtcaaggcaagcctggcttacacgagaccccaaacaaccatagaaatggaagcatatgtgaacattaggcccatgaaccctgttttggtgagttctaaagcttatggagggacttttcttcaataagtctctgcctttcttcctcctttctcactgcttggatcatgctctatccttttttttcctgctttcttcttaaaaactagaaaccatgttagcctattctgatggaattcaatgcttgtgggaagatggactaggaaaacgtgctaagcttgagggaggtttgtgttttttgagtctttactcaaaatctttactcacccgaaggtcctgggttgggtcctggggtctggagggaggcagtatctgaggcatttggatgttgacaaaatactttaacacaacatcactgataaggtgtagcaagaatgccaaggcacatgggaggcaggagggttcctgacaggagtctggtgctgagtcaggctgcatgtcacagaggctcttagaagctgccagagtcttcagagccagctgagatgttggctataggggctcctcattcttatgacattagactatctccaaaaggaagaacaaatatcagaggaaatagagaaaagcctttgtttggacaccagtctccttaataaagccagaagcgataaggggactattaaatcacacaggatgctaaattgatttatgctgaaaactgctgcaccagaagtttgttttcccacactttcttggaaagaattcttagttcctccccctcctggttgcacaagatggtgtataatggcctctcagaagtggggacaaagttcctcaaacaaaaccccaaagcaagtcaaaaggtcacagagcgatttcttcagatttgtgacaccatggcatcttggtatctggaagtaaatagaaaacagaaaagagaaccgtgtaaaccaatgtagcatctgtgccccacctaaatggatacattttgtggatctatttttttttttttaagtcgagtacatctgtgtcctatcaagagttcacccccagagtgaaacaaagttggagtgagcatgaccactcttctctgatttcccttggcttccctgcttcatgttggaagttagtctaaatgttagaggggaggagggccatttgtagctttaattctgtcctcaatttgcaaacaagaaactaaaggatcccaaaagatgatgctcaaatggtggctgtaaggacactctcacccaatagctaacccctgttatggtgaaacctttgatttaggcatcatgctgctctgcccctgtcacctggcagtatgtctcaggcagtaccctggtcagcacagggttccctggttgcacacaggtgcaaaggacccctttaaaagaaagacactccccacacttatgttcttttcccctctctctctttcctgctgttcccctggggcagacaggacttttcctgtctccctcttctgtcttctcctgtctctgtgtctctttacctcttttctccccctccccttgcctttctaataaaacttttcacttaagctatgtctggcatgtttgtcccctggttaggtcacccttgcctgccatggaatctgccaaggttcactatgagctttatcataacatagggtaacactgcaggtaatgggtaagtccattacttttcttctggacacaggagctactctgttttaacctctcactcaggtcccacagttccctctccaattcctgtcacagagatggatgggaccccttccttcccatttcagaaaaacctgggactgctttatctgaaaaagctgtctcacttctgctcatccctctctgatcttatggcatggtatttgatgactagggtccctgtagctcattagtttattagttaacttcctgctaaaagtacagacaggtttttacaggcttcatagtcagggattaactcagatgtaacttcaaaggtttagagttttaaatttcctctgatgtcattctttttaacctaaagccatagccttttgctatgacaccaagacgtaagtctgttccagctgtcttacctaaaggttcctgggagaagttctgcttctgtatcaagaaatctggtttggtgaaagttaacagtctccagaactcatttttgacgctacatatcttcaagaatatcatgcaggttcactcctattgtctgagctaagatgaacccatagactgtcctccagataaagccagcacctgcgacatcaccattggtactacctctccaggctctcctacccaacaactggaatctggttttctaagatgtcccaataaaggacacatctgctgtcctgtctctctcatccacccttgccccttctatactaccaggacacttctccattgccttcattctggcaattatcaccctttccatggctggccccattcataggaccaatggtaacaatctatttttctcctagcgacctgccttctccgcctcctcaaggaacaggtgcctgagatctataggatggcagctaactgaatgcttcttcactcataccactccctgagtgtgatactgctgactcctgactctccccctcctcccccacgttatcccttgtcagcaggaaaaagccagacatgaatgggcatccatatgcccaaagagtctgggatgttatggtgaaagcttcaccccagcccctggcatccatatacccaaagagtctgggatgttatgggggaaatttcactcaattcctcctcctctatctctctccaaaccctgatgcatctcagaaagcccacctaatgatagcccctcccccagagatattcaagaccactcccacagggtatttaaattgcctcccagaaaatagacatgtggttttccagtctctctttcctgtctcctctctggggggctggaaggccaccagggagctttgtatccactaaacgtgggctttttctaattcggtttgatttggtctgatttggattgctccatcagatttggagatgcttttcaatccctactactactttttttctccagagaattccagtttggactcttgactctcccaatagtgacttaatggggcttcttgagcttgagccagtggtgaatgttgtgcccaaattctgaacctcaatatcaccaagagatccattctgatgcaaaagcaaagtatcttttattaacgagttaactgtattaactcaggccctttgtccattcatcacggggtgggggtggagtggggatgggggggtgaaatgagaaggacccggagaaacttcaaggcagggaatttattggccagagcaaggggagtgtctaagggtatgcaacagtctcaggattggtgcacttctgggcctgggcaacctgttctgtgttgcttggtctattggttgttatggcctatagaccctcccagtgctgttgctatgctctgcatatcactgttaaccccacttttactgtaaaacatgccctgagccctccagctaacttctgactggttccttgccacatggagagtatctgacttcctagtgactaggagatcgggcaagtttaggcaagcacatgttgctgctgagttaggggccttttctgcagtctgtcatggctgctaaagcagggtactgggggagggtctggtcccttcagtgagtacatgacctattcaggcccactcaggtagaagtggggaactatgttcagagaagaaatttttttattctactactatgggaaccagcctttcactgtgtgtgtgtgtgtgtgtatgtagtgtgtgtagtatatgtgtggggtgtctgatattgtcacatactctgctcctttgatgtgaaatgtagttctcatcatatccagtgttctcccagcacccactaggcaaggctgttccatgggagattggtgcacaagaaagttacctgacttctccaggctgctgagtagagctggtgactagccacataatggcactagttggttctctgcctctgtctttggccatggtatcttctgttggtccccagtgctgtacatgacatggctgccattagcatatgactaatgagacagaagaaatgagaagaaattacctgcaccagccaagatattttagatgtaagggatagatggtacaatacactacctaagtaataaaactatataggcccgggttaacagtgtggatcagtggcaagatatatgacttaagagtgtagcaggtcctggacttaatctccagcactgggatggagagaggggtaagaaatatataatgaaggaaataagaagtacttgggcatgtgactcggtacagaggttctaataaagtcatcagggtcttattaagtcacttgagctccctgtcagccacattgccttcattctcacattccacacgagggcaatatagggtgtcactaactccagacatacctttctctgtgcttcagatcaatgggaaagagagggtctcttcccatcccagtccccaaggctgcacaagtctcttgcccttcattggctcgggtgtggtcatgtgctcattcctggcccagcagtagggcagggcagtattcagaatggccagtaatagctaaagaaagtaactagagactgaatggaagactagagaacctctcttctggatcccacgatgcctgtggagtttctgtacctgggagtttttccaagtgagcagactttttttttttttttttaatatatttatctctttgtattgtgaaaagggcagagaattgaggtcacagtggcagtgctgagagtccaagctccagttacatgggaaagaatagatttacatagatggctctgaggcttcaccgagatttcctactggaagtgacctttgaaaatgggaagggcttatcacaaatgcattgtcgctcttactgtgattattacttctatctcctctaaattgtgcccactctggtggaaggcttgttgtcgttgctttttttttgttttctcaagacatgaagtgtgaatgtaccattaacaagaaatccaagcaagactgctgttgtaagacccccggaaagctcaggcctccaggatctcagtccaggaccgtggccaccccatgcggagtcgaaagcttgatgcaaactgcacgaggctttattgttgtctaatgagctaaccccatgttagctcgggtcttttatccacccgccatggcggatggctagaaaagacagctcaaaccagctgcatagagatcttatagggcagcgtaaggggagtgtctaggggtacgcacaggctcaggtacgtacagttggccaatcaatacaggattggagggcttgccctgtattgattggccaactggttgttatggaccataggccctcccagggtggttgctatgctctgtaaagcacacccagagccgtaaagcatagcaccaccagctaacttctgattggttccttgccatgaggcaggcatctgacctcttagtgaccaaggcaaggtcagacaagcatgtgttcggctgttatggctgctgaaaggggcaggtatctgatcttagtgactaagacaaggtcagacaagcatatggctgccgaaatggggagctggtcccttcactgtaagcccatatagcatctttggtagaatcagcaacagagctcttgcacctcaggacaagacagtctcctggaacaatgcgtccctgtagcaagtggatagcatttttgtataatgaaaagccaccttgccctttaggtatgtatgctcaggtctgttgcattgtggggtttttttgttttgttttgttttgttttgttttttactgtagccacatccttagcaagaggggcagtttggggagggagtgctataaagtttacaatatgcactgctgctgtaccctgttatatttgagggagaaactactgagcaagttgaagtcttcaaggcttactctccattttcttggcaaaattcatctacctgactaggaccacttaccaccgtccgcttttctgagccttttcacttcaggctgccgaatatagcagtgcaagttctttcctttagttaactacacagtagggagtgatccagattctggattccactgccctttgcttgtgcttacctgcattgcattccagctaaaggagttgaccctcccttttgaactgtgttgatgaacgtttttccagaaggcatcccatcctttaagacacagagcattggttggccataatttagtgttggaatgtcagggcctaagttcttccaaaggtcaggggcagggagtgggagtggtggcaggcgcgcacgcgcgcacgcgcgcgcgcacacacacacacacacacacacaccccatacacacacaccacacatatcccccacaccatacacacacacaacacacaccacaccacacacgcgtcgcgcgcacgcacgcacgcacacacacacacacacacacacaccacacacacacacacacacaccacacacacacacaccacacacacacacacacacacacacacacacacacacacacacacacacacacacacatacacaccatacacacacacacacacacacacacacacacacacacacacacacacacacacacacacacacacacacacacacatacaccatacacatcacacatacacaccatgaaatgaacaatgtagcaggcttacctagactaaccaccactattgccagccacagtacctctggaaagaaaagatttgaaccagatctaaccagctttgaggatccagggaccgtgttagcctttgtgctactaaggcaggctattttcttgttttggaaagatattcttgctctaggtagaggcaaatgccatgttgtggtattgctctgtaacaatttatatcttttactttagccttggggtctttggagtccttagagatgcctgcttctaacagaaaaatttcagaacagtcattgccaggattatcctgtcaccatgacatcatgggtggcttggctgaatctggtgtcagtttagagcataatctgtttgtctctttctgtttctagctctctcctactccctccactcaaaaaaagtgccacattgagaccagagccccctatatggcataaatattttacctctgagtcacatccctacctatctctcttctttttaaattacttatttgttttacatatatgggcgatttacatgcaatgctcatggaggctgggatatggtatgtagttacctataactgtagtttcagttggttatataagcagctatgtgggtgctgaaaattgaacctgagtcttctggaaaagcagccagtgttcttaatggcagagccacctcctcattttcctctctttttattatacatgcaaacaacaacaacaacaataaaaaccaaccaaacaaaagcaatctgctgccctgactttcatttcctgtgctccattcttgctttcacattatgcaaatttgttagtttttatgttgggttcccaatagatataatctctttttttcccacaaattccttggagttcacaatggaaggcactagaagcctggaaatttaggcagtagttaatagggcaaagcttcctcatggggaggtttgggtgctagcctatgtcctccacagccattcccagaggagtgttgtggccatctgtagaagccccacattgcagagccaatctgttatagtctttgtgggacttcagtgggatccagccaacttgcctggtttgtacctgagacagagtatggattgagaaagggcaggtaaagatactaagaaaaagacagacacaggacagagttgggagagcaatccagtgaatactggacgccccaagtttatttattcttcaacattcttaaataccccaaccaaaaaagtggaacatggcaaaagacttctttatcatgtacaaggaacaaatagactttcccttaactcttcaaacatttggtaaccacaccttagacccagtttctcattatcttgagggtcaagagtaaccacacctcagaccaagtctgttgttatttagataggacacccactaccaagatcaaccatcctatagtagccaaaccttagacatttaggtcttatgactttaaccttggaagactaaggacagttttgaactctctgaccttaagtcaagatgaaatagaaccatctctgtgggccttgacaattccctgacagaactattttcccaatctgctttcccttgcaaccagcctcatttaaaagatcagccataaagaaaccttcctaaaacatgatggaaatcataggcactctcaactccttgtaggtaggcacctagtcatgtccatttgggcctctgtgtggattcttcatttttccttataatgtgatctatgggagtgagaaccccctggatgcaccaaagtctcccctgacatctagattactgggggttccatcagttctggaaccctggttgcaaaccatagacaggggaagaagttatagtgctgcccagccaggtgggtgcaaaatggcttattagctactgttgtatacttggggtcaaaagacctgcaaacgaacaaattaaagattttgcctcatagtttatgagagtttgtgttggtcacttggccctgtggttgcatgaggcaggacattatgtcagtggagcaggagcatggagagaactatttatctcattgaagatggagggtgaggtgtgagttgggaggacaggaaccaggtataaccttcagaggagctgacagtgacctgtttaacacttgagtctgtggagctaggagttattttacattacaactataaccattagacattcttctggagagtatggacttggttctcccactacagcatctgtctccttctgggtctaccaatgtcagtcttccctcctgctgctggctctgtgggatttcctaacttgactatccttctggaaatagtcctgtcctatttacctcaccacccctctgtgaaggtgccatcttctccttgctagtcccacatggagccccaattactgcttttgataaagacttgtggactttccctttcttggtgcttgggatatcaaagctctccttgatttctttgcattcccatttacgatagctttgcttggtggggttccagatgaaatcctatctgatttaatacacatctcttttctgtttaagaataggagcctgaggaggaaaatggggtgtgctccttcactgcctgccttctctcccaggctttctattttgccagaggagcaggaggacagaggaaagaacatgcccctgtcttatgagcaggtactgaagtgttgttggtttttaaccactaatgtctctggttcacactgagacctcaacaaagtcacagggggtgggcagtgctgatccctccaggatgaggaagatgctgctggagggaggaacaaaccacctgggacttaagcagctcactctctttacaccctatgtccactgcaggtcagcaaaggctcagctgatgctcgcttgcattcaagctcataggacagagtttgtatcacagggaatagagttcccagaagaccttgtatcacgacttatatgatcaatccttgtatttccttggtcagagctaagtagtcacatggtcccaccacacagaagaaattacaatcttactatgtgcccagaacaggacactttgtgctttggaaatatttggggatgtatcaatgattcaatgattactactagtgtgtgtgtgtatatgtgtgtgtgtgctcatcatgaagggaccagctccccattttggcagccataacagcctaacatgtgcttgcctatccttgccttggtcactaggaggtcagatgcctgcctcgtggcaaggaagcaatcagaagttagctggtggtgctatgctttacagctctgggtgtgctttacggacaagtgcacagcaatgacgtgcagagcatagtaactgccctgggagggcctatgggccataacagccagttgaccaatcaacacaggacaagtcctccaagcctggaggcacaccaatcctcagcctgtgcatacccctagacactccccttatgctgccctacaatacctttgtcctgtggtttcttggagtcttttcccagtcatctgcctccacctagtgattggggtcaccatggtcctgggtcaacatcctgggggcctgagcctccgggggtctttcagtcagagtattcagcctggccattgaaaggttcaggctttaatgctgatcagctctacctctttaagagacagaccctgcccctgacaacagtcagggcacgcacaggaaaacgtgctacgtcaccaccacatcacctgccacgcattacggcctgtgtgaagactctgggcatgcatggaatctcagtgcgcatgtgcagccttccctttaaaagttccaactttcctgcttcactctctctctgcctcttcttcgctctctctcacttacgtgctctctctgcctctctatggcgaccggccatggcggtcagccattacccctatttttctttttctttagtctccctgctctgtagggtcttataataaactggttaatatgtctcttagtctgatgtctcatccgcctctttttcttcaaaaacataacagccatattctttgtttgtttgagacagggtttctctctttggctttggaggctgtcctggaacttgctctgtagactaggctggtctcgaactcacagagatctgcctgcctctgtcacggcctggccctggccttgttcttgagtgaggctctgataccagtctgatggcctctggcccactccttcacattgttggagtccctgccatctggttcctaaacctccactccttgttggcctctcttggatggccacgaacaatggccaaagcccagccacttttaaaacaagggtgaatcgcttagggtttctattgctgactccattactaaaagtgatttggtgaggagtttatttccgcttacaacgttcacatcacacttgaccactgaggaaaagcaaggaaggtactcaaggcaggagcctggaaatatgagctgaagcagaagtcactgaagaacactgctcatgctgctttgttgtccatttcaggaccacctgcctatggctgctgccacctacagtggcctgggacctctcacctcaatcattaagacaataaccccagacttgcttataggtcagtcttataaaggcatcttctcaatcaggattccctcttctcagtgccaagttgacaaaacaaaacaaacaaacaaacaaacaaacaaaaaaccaaaacaacaacaacaacaacaacaacaacaacaaaacaggagaaagggaaatattaatggtaaatatctgtcacatgaactcgatcagtcatatatttgaagggcacagttgagttgaattctgtgtgtttacagtgttttgcagccattaccactctctagtttctgaacatcacccatggagcagccttccccctcctcccctgcttccactccccctggcaaccaccattctgtgttctctctctccggatttgcccgttttggatacttcctatcagcagagccatacagtgtgtggtcttttgtgcctttgagcccagttcctgtgtgagttgtccttgtgccccacagacagcctacgtgatgttatactaaagaatgatgtgcaggggctccctagaacccttttctccacctgtgcactcctgattttctttctcccttctcaggagctcagcaccctactgcctgggcagcaggggacttcctgctttcccttcttcagatcctgagtccctccttggcctctcttggagtccttccctgactcttctgagactggcctttgagagcaggggtcacacccatgggtgtgggaggtgggaagacaaggtgtggccctgggccactttcagaggagggaaacactgcacttccctgggctaatcagttctttgcagcttaggtggttaccagtacagtcaaaaccacagttaccaatgagagggtagtgtgtatcgactccctcccttccttggcctgtgttcattgaaatagaaattattaatttttttttttgccaggtattggtggcacacacctttaattccagcactcaggaggcagagacaggcgaatctctgtgagttcgagtccagcctgatctacagagagagttccaggacagcctccaaagcaatacagagaaactctgtctcaaaaaccaaaaaaaaaattttttttttagatttatttattattttattagtatgggtgttttgcttgctttgctcatggtgtgcataccacgtgtgcctggtatagcctctgggactggagttagagatagttgtgagctgccatgtgattgctagggattgaacccaggtcctttggaagagcatcaggtgttgggagatgttggccccccagcccccacggggtctccatgagttgcttagcagccaataaccacaggtgcatccagttctctagtcctctcttacagctctggccttccccactggcatcgacatctagtaggaggaaaacacgagctcttacacctggggtttttccactgtgctgtacgtgtatataaggctgctctctccctgcaataaagagactgagagatggagacaggcagagacacacactctcctagcacaaacaactgaacatctctgcgtttaactaaatctccaggctttcaccccatactcgacttagtcatcgtgcagacgccacaagtggaggttccattagacttagttgtggtgcggacgccacaatcaggtgctcttaactacagagacaactctttggtccatggcccattgaagttcttttgcactgctgtttgcagctgtggccccgagtgcccatagtgccccaacaagaagggccctgcttcatattttcttacctaagcatcatcactttatactgttgtttgcctgctccgtgcctttccatgattccttattatgagtggaataaattcctggcattgaaggccctctacaaactgactccaggtgagctctctagctttctctctcttaccacccccagcagattctgtccctccagctgaattacacagttgcagtttgccctgctcagtttgctttggggacctctactcagcctctcccacctggaaggtgtctcagtttctgcttgtgaagtttttcccataattcctcttggccttcagtattcctgtgctctcctcatagcactctggtctggtattagttcttggacaacatcctgcggccttctgtggttggtgacctcctcatgtcttgttctgtgctaggagcaaagtaagttgggaaggacagactaactgctcacctgctcttcccacccctcatgtacttaacaaaggaaaccagtagagccaggcacagggagcccagccagggctgaggaatgctctgcttttcctgattgttgaatggagttttaggaatgtgcaaaagaagactggaaaggctcagtcatcgccccatgcctgctgggctcttgctgagactggagatctggaagatatagttgattatgaactgttatttcaggatgtcctaagtacattttgttgattccatgtctgtatgaaggaatgagaagagagcatgttgggaggaagagcaaggcatgctggggaaggaagatgagttagaaatacagacaaaagaatgagtcagtgtggtaggagagaggaagggggatggattcgggaacccaaaccttggctgagaagcagggtctcagttttttaaaggggtgagccctgttgaccagccccactgcttctgtgccacccgaaccaggttacacagcagcctagtccttctgagctcgcctggccacgccaaaaacatcttcgagtgtgacctcactgacatgggaggtactgtgttggccttgctttggctttaacctactgattaggccttggaattatcccaggccttggaggaatgcccagaaggatagagccactgccacatctgcagtgcaggctgacctttctcacagtgccccagagccacccttgcatcagaaagtcccctgggccatgtgggaagagggcatgtcccctgttaaggactctactggcaggtttctgtttggggatcttctgactttgatactctaggtaactcttgtgcttctccatggctgctctggcctcgtgtttccatgttatctctatattcattcctgttcaggagcacctcatctggactttgccagaaggaggctgggctccatcattcccctgcagtctacccacagctattgcactgattttgctaaaagccctatcctgtctttctagtcatcgacttagaagtcatcgatggagtgggagctggggagtgagtactaagctcagtagtagagagcttgcacagcattagtgagtccctgggtcctctcttcagcctcgcggagcagaaccaaatacaccagctgtagctcctattgtctatggaacagttagtgcaaacactgcctctcctgagggaaggcacaaaaccacaaactctcactcacttctctgaggacaggcttaggtgctaggagaagggaaggacagtgtggaggggactctgctctttgcagagggtacaatgtggattctggctcccgggtgaacctgcttctgagtgtcttttatatacagagttttcttttttcgtcaggtcctgttgtataggactatcccctgggccaaattgccacatctttatcagctcaggtgtgcaggcttgcaaaagatcatcacagctgggtttgttgacagttgaccccttgtttctgtccacccacaccttccaaccagctgatgcaattctgccccaatagcaattggcccctgggaggactgagggaggggctccatcttcacagccatgtggtgtcaccattcatgctaggtgcagaccttccaacatggccactttaaggccatctctgtttctcccagtaacctgtcacccattgctctacaagtaagcctaataaattcactggtttcccagggtgaactttggcaaaatcacacctctgcttgttgggactgtgggaggaagggcttaccttatgttgcttacattgccaggaagcagttttaataacaggccctctggcaatattgacttgagtgattgggggaaggacttcagataacagctcttcccagggcctgtactgtcacctctcagcccacactcactactagtccagttttgccctctgagcccggctgaaatcacacatcatctttcaaccgagtgcaagaagtgccaccaaatggccaccgggatgtaacctatgcctggctcaggagtaaatggtatactcattgagattggatacacaacatggacagatgagtgaagtagactcaaaagtggcaggagagccactaaagtattgtgagataagcccattgggggcatttaacccctttcctcatttcccttctacactgttccttgcctacagagtaggggcattccctcccctcccctcccctcccttcttccccccccctttccctcccctcccctctctcctttcctttccttcctttctttcccttactccccaccccctctctccctctctcctcccttcccttcctttctcctccctgttttccctttttcttcttagagctaggatttcacttgtgacccaggatgactttgaacataactccccttcccccagccttcccagtgccaaggctataggactgtgccaccacgcctggctgttgcttttatcatatggtgaataaataactcagcaacagtctgagtagactttcagaattgctggctgagatggtgattttagggaaggtgtgtgtgtgtgtgtgtgtgtgtgtgtgtgtgtgtgtgtgagagagagagagagagagagagagagagagagagagagagagaggagagagagaaagattatgtgtgtgagtgtgtgaaaaagaatatgcatgagtgtaagagtgtgatgtgtgctcgtgcaagagaaagaatgtgtgtgagagacataaaaagtgtgtgagagtgtgtgtaacagaatagcatgagagtgtgtatatgtgagagtgtgtatatgtgagagtgtgtgtgtgagagaatgtttgagtttaagagagtgtgtgtaagacagaaagagtgtgtatgtgtgtgagagagagtgtgtgagagagtgtgtgagtatgtgggagagtgtgtgggtgtgtgagtatgtgtgtgtgagagaaagtgtgtgtgtgtgtgtgtgtgagagagagagagagagagagagacagagagacagagagacagagagacagagagacacagagagaaagactatgtgtgagagaaagtttgaatgtgagagagtatggtgtgtatgagagagaaaaagtgtgtcagagtatatgtgagagtctgagtgtgtgagagtgtgtgtgtgtgtgtgtgtgtgaaagagagagagcagagagagagagagagagagagagagagagagagagagttttaatagctgaactttggagtttcaaaagcatatctcctaaggggactctggcagatagagtctttaacactaaaaaataaaaccaggagacatggaagagttgtcctggtagaaactagcagtaggttcttttatctttcatggggctctaaggacataggtatatgcagggaccattatctcctaggttgtatttctgacagcgagaagagtagctgtattagatattttctcactgctgtaatgaaataccaaaaaaaaaaaaaaaaaaaaaagcaacttaaaggggtgagaggagggtttatcgtggcttacagtttgagggagtacagcccatcatggcagaaaaggtagtgggggcatcataaggctgcttgttcacatctaagtggatctaggagcacaaagggacttattctagtactcacctggctttctccttcccaacctttagtttgatctgggccctgagcacatgggatggatggtacctcccattctgggtaatcttccctcctcagttaatcctttctccaaatgccagaagttgggcctcactaattgtttaggtgttattaattctatcaagttgacaatcaaatttaactatcacatgaactgaaagggaaattgggtataactgtgaaaaagcaatgaaaaaaaaatcccactgggtggtatatgtctttaatcccagcactcgggaggcagaggcaggtggatctcaatgagttcgaggacagcctggtctacaaagtgagttccaggatacctggtactgttacatagagaaaccttgtctcattgccctactcccactccccaaaaaataaaggaaaaaaaatcccataaaatatggctatatagcccaagctggccttgaatttatgattcctctgtctaagtctccctggtgctgggacatgccacacctggttagtgagcggttcatttgaggcatgttttagatgatatttgcatgtatttcatgtagataccatctaaactgtgcttatgtgctggagctctttgtcccagcctgggaggtaagctgagtgttttgcttaggaagtacacagttcattgcaagagcacaccctgtctgggacataggatgaagaccttgctgctgtccttcctgaaaaaactactgtctttggagaagattcaacaccaacagtcccgggagtcaggcatgttgtggggtatcgatgacagaccttacagctgtgagactaggaggcggcttagtcagcatgggtaagttgatttagaaaaacaaagcagcatcctccctgcccccccccccaaatccctgaagtatggtgactgaattaagcaaacaacctttaccatgtttcttcaatttgctcataatagttctgtctcttaatccctttctcttccaaagtgcaagggggaggcttctcaggtggaaagcaattatgatgaaacctcattaatgaggaaagattaactacccaggaagaagagaccaaaggtttccaagtgcaggacagctgcccagacagctttcttctctctctctctctctctctctctctctctctctctctctctctctctctctgtgtgtgtgtgtgtgtgtgtgtgtgtgtatgtgaacagagtctctatatgtattctaggctaggctgtcctcaacttccccctttgctccctcggccccattactgggattacaggtgtgtgccactatacacacccagctcctctgctgctttgaaggtagctcctgggagattatctgacagactatccacacataaagccatcatcttttgggctctaccatgggcccatcagggaggctcatactttgtaaatgaacctgtgctgtgaaagtccccctgtgcacactgctgtgtgtagctttccctctgtttaacctgtcagttcatattgagaactttcagagaaccaaggggaaggcttcttccacccatacattggcaaaataagagctgacatggtaggttgctcattagctctaggtacatgatatatgtatactataagccaattcttagcaggttcacagaagacaatgtatttggtaatatattttctggaggcaatttttttttgtcttcatttttgaaacaaaggctcagtgtgtagcccaggctagactccagattcccagattagaggcatgaaccaccatgccttagcttctgtatgacaattaaccctctccaaactcttatgctggaagagttatgacaaagatccctcatgacagagatcaaacccagagctctggattacgctacataatcactttcctacctacctatgcctcagtcctgggaattttaaaggttagtttagggttccctatttgtaatattattgaccttcgggttagctctttctgactttgggtatgcattataatattcagcaggagccctggcttcaattcattcaatagcttgacgggggatgtccttctgtatatatgtttctcttattggttgatgaataaaacactgttggccactaaggcatgaagataggtgggactaggagaagatgggaattctgggaaatgtaggcagacacagtcaccatgtaggccgccaaaagagtaacaggtccggacccttctctggtatgataaggccacatggaaatacttagattagtagttgtgggttaataattaagacagagttagccaataagaaactctagccactgactaacagttttataactaataaagcatctatgtgttcatttggggctgaagggtggtgggaccagcagggacaaagaacctttggttacaatagctagagcatttcttccagactgggacccggacaactatccagatattgatgtttttccttggtgtagagagagggtaaaaaatcagtctgggagaaccactaggattgcttgatgttcccaaagcacaggtcatagaacagtgtcatgaaaatagaaggtggggtctatggtcaaacaagcctagggatgctgttaaaacaggctggatgcagatctgaatgctcgcccccttccaagtttgtatattgaaatcctggacctagggtgatggcctttgggagatgatgaagtcaagagagtagaatcctcacagctgggattaacactgtcatgatgaaaaagggacctagaaagtgaccagtttggagcaggggcctcggaagcagcccttctgagttttttcttctttttatttaaattctttaattactacttatatttacatatccatcccccccatttcctcacacttccatcctcccatgttccccaccaatccccccaacctttcccccaactcctccacatggatggtgagaccctccaccagggaccttcaaagtctgtcatatcatttgggggagggcctaggccctccttgctgtatctaggctgcaatagtatccctccatagggaatgggctcccaaagtctatttgtgctctagggataaagactggctccactgttagaggtcccatggactgtcttggcctccaagctggcacccacattcagagggcttggtttggtccaatgctgtttccccagctttatgactagggtctccatgctcttactagctcaggtcaactgtttcttcgggtttctccagcactgtcttggctcctttgctcatccctcctccctctccacaattggattccagggttcaatgcttagctgtgggtgccttgtttcttcttcgaacagctactggatgaaggctctaggaatggtaaccaaggtagacaccaatctcattataggggaaggacattgatgtcattttctccaccactgtttggattcttagttggggtcatccctatggatcccctaacatttcccctgtgccagacctctctccatacctgtactgtttccctctatcaagtcatctcctttcttgccctcctctattcctcccctgtctcagtcctcttgttctcctccccctccccttcttccctttctacctccttcctctccacccatgctccatgctcccactttgttcaggggttcttgtccccctccccttctttgagggaacatgcaatcttctcttagggtcctccttgtttcctagctcctctggcagtgtggattgtagactggtgatcctttgctctatgtctaaaatccatatatgagtgagtacataccatgtttgtctttttgtgactgggtttcctcactcaggatggtttcttctagttctatccatttgcctgtgaatttcaagattccattttttttttctgctgagtaatactccattgtgtaaatgtaccacattttctctatccattcttcagttgaggggcatctaggttgcttccatgtttttacccttggccagaaactaggaaatatccttgattctcttgcaaagaatgccagcaggaggctcccattcctcttccagtttcttgctgtctttcttgttctaactaagcatccctgcctgcaaattatacatgaggatgtgaatggaaccgagacacacctggacaccttgtggacggacagcttgtctctccatgcctcatcccagtttctgccataagtcccgtggaaagcctagaccagcaactcaatggtactccattttttaagactcacctgtgctatgtaagagttctgccttctttctttcccttaagctcccacctagaatcctacagtgccacttctttctaaaacttgatcttttgcggtctgtgaatttcactcttccaattcatgacacaggaacctgagccatggactcagtgaaagttttctgtgaccaggaacttctgtgaccccttaaatcatgagttaaagccaatttgaggcgaggaggaccctgtcactctcaaagatgtccacttttcctacaccactcatatgagatgcctgggagttcacttctttgttttcatcatgtgaaaacccagaaaagatggctatctattagggagcaagctggctctccctcaatttggacttcccagaccctaagctgagagaaaggcattttttgatgcttatgagtgtgggaagcctatggcactaaaactgctgtcaaaggctaagattacaacttgaagatcttaagatttgattcagaaattgggcaacacttcattccataaaattgaatgagtgttctaatagccagaactgaagaggttgttttttttcagatagaaaaggactgacaatagcataaacagaacccaaagtggatgggtcattccaaagttacttccattctaaggcagtgcagggaaactgggcaataggaaagcaatggttgattaacatcaggctatttcaggtcacttcttttgtgtgaaggaaagcccagggaatttcattattatgcagagattgtcctgtttgggatatttggattctatctctttaatattgattgctctgaagttcagataggcagcttagtgtcagcttggcctcatgggattttaacatgtgtgacttcatcaccattaccatctctacctctcatttctgtttgacacagttaatgtacactttaacttttagtttttggcattaagttttaaacccaaggtctcatacatgctaaatgtttgttctctctctagcccccaaaatttgtttattggttctgttctctctcctttcttccttccattgcaaggtgtgtgtgtgtgtgtgtgtgtgtgtgtgtgtgtgtgtgtgtgtgtgtgtgatgaagctggaggaggactttagggttcctgttccattgctttcagtcttcttccctcaagacactgtctcactgaactaaactgatggccaacaaatcccagtagtcccccttcttccaccctggccccagtaccgagattacagtcacatgcagcctcattcagctttttgtgagggtgttggggactcaaattcagatccttacatttgcatagctagtgctcttaccgatcaagccatctctccagcccccttagagctcaaagagaaaatgtgggattaacacttggtgaatatatgctgggtattgctgttagtgacttctgtgtactataagataataatgaatatgagttgataataatgaatatgtcctcagtacaccactgttctagtgtctgccaaatagatttgtttttccttattacgattcttcagagtacataaacattacttctcctcaagaagagaggtgggactcatagagtaaggttattttctgctggccatgcagactgcaaataggcagagtggactgtcactgattttggctttgaggttacctattctcagtgaggttctctgctgccttggggtgtggctctgaggatttgaaatcaagccagaagccaagtggatcatcattctgagtggcactcgctcttccatattcagagtttcttggagaggtactgtcagctgggcccccattttcctgggcaagtgcaagactccatggatggatggatgttggctaccctcagtgtgatggagaaattactactgctcttacctaaaccttgtttgtcttttctaaaagtgagaattgcacaactgtgttacttatgttttccctctggttttcaggaagctctggtccaaaatttccatcttctgtaattgtaccatttcatgcttcgttctatttattacattttgtcacatcacagatttcatcatttttcttcaaccactccttcctcctaacttcctgacacaaggtctcattaaatattccaggtcagaagttgtaatgcccctgcttctgtctcccaagcgctataattacaggtaacatcttaacatgggatgccatgaagtgacagtaggtacacacagctgtcaaaggaagaactgtcctcactatacctgctttattgtttgtatgtaccgtgtgcttatgtgtatgcatgttcatatgtgtgtgggccatgtgcacaagaggcccaaggatgatgtcagacatcattctcaatttctccccactgtagtgttttgaggcagtgtctcaaaaaacaggaacaaaaccaaaaactagaatgtctccagtactgccacagtgattccatctggttttaatttcctcatcttgttggagaaatctttacatgggttatagctagaagtggttttatttagatggagcataaggagccatttctgtagatcatttattactttttaattaatcaacttacaccaatattgatgtagtgctttgggttcctgaagtttgtgtctaagcattctcttccacagttcagtcaattgccctcttgaaatgcaggtacagacatcactaatcactatgtgccttggactatagatgagtaaaaccgaactccaatattctaggtgacttagttttgttttctagagtggtgaataggaatagctctgaatatctccaggcaagaaatcatgtgaggagggggcaaatctgtggccactgctccttcctcacttctgcctccttggtccaatacacacatcagggacatggggtggtaggagccacctggatttatggatttagccccccccctctcttcctctctcctctctctctgcctacctccccctctcttgttttccccctctctctatctcccctccatttactccctttctaccatttctatagccatcatctccatctctatcatccccattctcccctctaccttatttctgttggcagtactgggaattgaactcaggaccttgcacatgcctggcaagtgtctcactactgtgcccataccccaagtcacctactttctccttttcagtggaatccaatgagagtcagagccctcagtatagtgtctagacacacacatgctccactgacaaggcataaaacagttcaagactgcatggcgtttttaaacttcagcagttttacaactgaatgctagatcagaaactgaagatccgtgaacatgatggattttgtcggcagtatctgcctggcaattttaaaagcagataggtcaattggggacagtcttcattctcaagattcattcgactttggatgatactaattttaaatcagccattactaatgggtactaaaaatagactacacaaaacacctagtgcaggtattacagcttgacacaaatctgattacttttctgcagcactcctcagttgatattttgagccctgcccccaatacctttggcagcttcaagtgttgctttagattcaggttttttttttttttttttttttttttttttttttttttttttttttttcaagacagggtttctctgtagctttggaggctgtcctagaattagctcttgtagaccaggctggtcttgaactcacagagatctgcctgcctttgcctccctagtgctgggattaaaggcatgtgccaccaccgcccagccactgatttaaaaccagggttttaaaatcagccactgagatggagtgtaggcccacaaagctgctggggaaggagaaatactgttttcttttagctctagagaatggctggagcagctaggtgacttcctgcatgctataatctcagagtttcgggttaaaaaaaaaatcattcctttcttggagctttgccttttgtctgccttacagtgcaaattaagagcaattaaaatcaatgtcctgctttctgaatggtattgtttatcatactctgcttcctttgatgtctggtcatagataataaactggtccactgtcactatcagtacatgggatggtgtaaccacacaacttgggacttgtcctctaaggactatttgttatttaaatccaaggtcctattctttttgatccctttccttaataaaaaataactaattgttcatgcatgtgtgcgtgtacgtgtacgtatacgtgtgtgtgtgtgtgtgtacgtgtgtttgtgtgtgtacattcgcatgtgcgtgcgtgcgtgcgtgcatgtgtgtgtgtgtgtgtgtgtgtgtgtgtgtgtgtgtaagagagagagagagagagagagagagagagagagagagagagagagagagatgagagcgtacacgtgttgacagtatgcgagtacacattcatggactagagcagttactgactctccacactgtgcccttgagacagtgtctcactgaaccagaaactcaccttttcagctaggttggctgatagtgaacttctaggatctgcctgtttttgccaggcagcattggtgtcccaggctcatgtagccatgtccagcatttactctagtgttggggattcaaacttgggtcttcatgtttgttcagcaagcactcttatccactgagccatctctctggcttctcaattctgtttcttaatttcctatgaatctgctaccaaatggtcaaaggataaaggactattgtttggctgtcggtttgacagtcgtgccttgagttgctctcattttcaagtaaaagggatcatgagtcttgcatgatgcagccacaaatgggactaaattatgctaagcaaaaataaattctcgtactgagaatttcccaggagttttgatatttttgactcttactcactaaatatggaaaagattgagacactgagaagcaggggagctgttctgccttttttagacctttgaagaagccgtttcatcctattcaatgctatattagcaatatactaaaaatctctctctgtcgaaaagacacagttctctgcatgtcaatgttcaggaaatgttcttttagcttccatttttatataggtagcaattaattgtataattaatatattctagtggtctgggtgttattcatatatggaaatgatagaaatagacatttcactgatttttcttttaattttctaaacaagaccttactatgtagctaggttggcttgtaacttttgatcctcctgcctcagcatcccagctattgaggttacaggcctatgccaccatacctggctgaaattccatcataaccctctctgtgttcctcatttagtgcaggtttctggtgttcaaagtctacagctgttggtggaaaatacttacaaaggctagggaggggatattgtcctcattgcggctgggaaggctaaatctcaagaaatattgatggagtcagatggtggtggtggtgcacatcccagcacttgggaggcagaggcaggtggatctctgtgagttcgaggccatcctggtctacagagtgagttccagaacagccaagcctacacagagaaaccctgtctggaaaaaaaaaaaagaagtattgatggaagcagtcagcaacttcagctgatggcctttaaggatgtggtggtagtaggcaggaagagatgaactgagctagccagctcagcagcactcaaaatgtgtgacttgttcagtagcaggcactgctcactgagggtcctaggagtttggtagctatggtaccaaaggttatcagacagattggtaacctttccgctcttccacagcttcccctggtagcataaaacatgtttttctgtcccttgtggcacacacagaactgatagagccagatgttagatcagctctgcccccttctttaactcccttctctgtccccctctatcccttttcttttttctgagaactcagccttgtacacaaaggcccaaaggtctttcccttagggttgtgagcagccattgatcctcattgctgagatccactaattcattaggacaacacaatgatacaattctgcatttaccatgttagcttcactctggaatgcggaagtgaagagaactttctcctagaaactatttgaccatcttgacacagttactttggaaagtcaaaacaatcgattcattccttctgttcagttaccttttatgataatgcttgtctttagcattttccaagttaatgagggctgttttctgttttgttttatgagataggctctcattatgtagccctggaaatcagactggcctcatgctttaataaccagcccttttcccaccgaaccatctccctcacccatgatgatgttttaaacaaacgactataaacatataggtattttcaatcacttacagtcttggtctttattgattgctcaaacattccacctttataccaacatctttgttgtttagatcatcctcatgacctttgttgctgctttgcttttcagtctgaagagatgttccatttagtcattcatttttggcttcagacctagaaccagttatctctttgagtagatacacttcatgtaatagaaagcaatcttcagatgttgaagggaccagctccctgttttggcagccataacagcctaacatgtgcttgcctgaccttgccttggtcactaggaggtcaaatgccagcctcatggcaaggaaccaatcagaagttagctggtggtgctatgctttacggctctgggtgtgctttacagacaagtgcacagcaatgacgcatagagcatagcaatcaccctgggagggcctatgggccataacaaccagttgaccaatcaacacagggcaagtcctccaagcctggaggcacaccaatcctgagcctgtgtgtatgcctagacactccccttatgctggcctataagatctctatcctgtggcttctaggcgtcttttcccagccatccaccatggtggatggatgaaaggcccaagctaacatggggttaactcattaaacaactgcaataaaagactcattgcttttgcatcgaaatgggcctgttggtgatttggggattcagaatttgggcacaacaatgtcaccatctgggtgcccgaggagctccctcgggttcgtcattattttagcagacagagctggaaaatttcatttccagttctgaggactcagcctgaggccccgggatgctaagcacgcactctactacccagccacaccctgatcatgccctcggttactaagccacacctccagcccctgagttttgacttacgttatttctctctgtttcctacttcttttgagatatggtcttaaactgtagtcctcctgcctcagcgtcctacacactaggattcacacctggctaaattacattttaaaaatagcagaatgagcatagatttattagagaaaagctagaaaagaacttgagtgggagaggctccaagggaggatgactcctactttactttttttttttttttaagtaaccagagatagtacatttatggcaatatgttacaaggggaatttgatcatagaactaattattctgtaaaatattaaaagattaaaatggaaactgtgggactgaaaagtgaagtttcagacataaagaaccccactttactttttaaaggtaaaaaatattactggactctgcattgatgtccaaggcttcagtaaccaccttggcagcttgcataacacctttgtagactacgagaacaagtcctcagggaggaagcttctagttgagttctggctggaatcctctaagtcctgtgtctaaagtgtgtgatgtcttgagcaatatggtcttaactttcaagtcctgagaggcttcaagggcaatgacaatagcctctgttattttgggagtcccttggacacccctgacagacaacttgaagggagcttttccaacctttaaccagtatctgtaggtgctgcccccttcaggtgagctgagtacccttcatagggccagcctgacagtatgtatatcccttgcttgctggagccatcagcctgattcccacatggttaatgccctgctgaaggaggaaggtaatgaatagcacttgtgtttcttgtcatcagcagcttttcctctccccaaacatttcagtcatgtgtctccaactgggttcaaattgaatttcaagtgtttgggaggcagggctgctattccctgatgctctttctcaggggtgtgttttaaatggaagctgggttgtatgagtcggttaaaattatcaccaaaagttccttgagtccttgctgtgttggtagtagggatgcagtgttggcgcttgttattggtcttatgtagctataaaagatggctggggaggagacacagagtgttccagatagccaaactcattttcacaaccctcaatgcagaccacactccattatttataacatcctcagcaacaattccccaagaactaactctaattaagaattcctgctcattatctagcttggaaatagatcagaatgagtcccagatcccatccattcctacagcatgaggtgtggctaggagggggagcacgcctccctccccagtctccccagaatgttggagcaaaagagcctcaacagcagatccaaatgggatgttcaaccaaggaactcttgtcttcagggtaatgttttttttgggggggagggggcggggaagggacctcccatttaatgttgtgggtcaaaggtaattcaaatgagcccgttgggggtgagaggctcagatgcaacagatgatgctgaagttgtggcacaagtaggattcctgcttccatagctgggattttcccagaggtagccccatgcatgctgtgatccgaggaatgataggtagggatagaccaagggatgtctttcactaccaaatgcttacttacacaatttactttcagttttcacttccctatctttctgatactctatcactgaacaaaatttcttcgtatccaggcactgtccttaaagataccccccccccccccacctaacacccttttcataagtatatttgggagaagctctgaaaaagccttttgggactagagatgtgactcagttggtagagtgcttgtttagctcgtagaagtcctggattcaaccgccagctccatacatctgggcatggtggcacatgcctgttatccacatccctcagaggtggacctaggaggactaagagttcaagaccatggttgtctgcatagtgactttgaggccagcctggaatacacgaaactctctctctctctctctctctcaaaaaaaaaaaaaaaggggatgggggagcctgcctgtctgtaccaggctctctcttagtcacacactaacgcccagatcacatgactagtaagtgatgaccagtatttgagatcttttgaccatgcattcattcatgtaccggtagttttcaatgtatgatcgtggaacaccccctggggagaggctagtgagagtcctttcagtgagtctgtgaacttagagccgttctcagagcaagccttttactctcggtctcctatgaatgtgcagggacttctcccaactgagtctgcataacaggtgatggaaaaggagaggcacagaagcagacatgaggatccagatgtcttctgttatgccaaacaccacagaggtttgcaaatacagagaacaatgctgttcttctcactaatttttgtgtgtgtggtttttgagctctctgggaattctccataatttcaaagaggaaaaaaaaaacccagcaaaaaacaagcaaacaaacaacaacacaaaacccaccactggatcaaatactggaaaattactgctttgtaacacagctagcagctttcctagccattcttgtctgggtgtctctttgtctcttcgatggctggtgtgttggctagatttatgtcaacttgacacaaactatagtcatctgaaaggagaaaaacctcaactgggaaaattactcctaaagatccagctgtgggccagcctctagagcattttcttagtgattgatgggggagggcccagcctaatgtgagtagggccacccctgaactgctggccctgggttctataagataacaggttgagcgagcaatgtggagcaagccagtaagcagcgtccttccatgacctctgcatcagctcctgccttcaggttactgccctgttagagttcctgtcctgacttccttcagtgatagactacaatgtggaagtgtaagccaaataaagcctttcctctccatcttgttttttggtcatggtgtttcattgaagcaatagaaaccttgactaagacaactgtgaatagaggcacttggtggtgtggaggtggggtagatcttctaagggagagtgaagcaccaaggagcctctggtgggagggagggcaataagaggagaagccaggagaccctaggcacaagactgtatatttgccctggactggtaattattatgacatagaggcaagggcaaagatgtgatttagaagagggcagcaaaaccacttagcagctcatggcccagacaaatcactcaaccttgctggacttgactttccttggctgtgaagtatgaaggctggattagcccagagttttcaaagtaacactatggggggaaaaaaaaaacaaatataatacttatagcagcactttgagataaaatgataggtaagtcagcagtctggaaatgtttagtttaaattaggcagatttagggtcgtctcctatcataacaacactctacctgatccagggtttgtttgtttgtttgttgagagaagctctcattatgttctcaggttgttttaagttactggactcaagtgatccttttgagttagcctcttgaggcttggcattacggatctataaaactgagtggctccatctttgtttggggttttatcctccttgtaatgctggggagtgaaccttgggtcttgcacattctaggtgggtatgctaccattaggctacatccccagctatactcaaggtgctgtgtgtatgagagggagagggagagaaagagagggagggagggaggaagggagggagagagagagagagagagggagagagagagagtcagagatacagagacacagagatacattgagaaagagacagacagacagacagacagacagacagacagacactttatgcagccccggtcgtcctggaagttgctatgtagttttgttgtttttttttctagacaggtttttctgtgtaatagctctaagttttcctggaacttgattcgtagaccagtctggcctcctgcttctgcctcccgagtgctgggattaaaggtgtgtgccaccacgccctgctacggaagttgctattcagaccacagagatccatttgcctcagcctcctgagtactgggattaataatatgcaaaacagtgcccggcatttactgagttttgatatgcttccttaagtcagagtactgcaaccacacaatggcttggcctagggagaaaataagacaggggagatgagaagactttggaagtagacaatttgatcaggcttttactagctcaaaatcttagaagttgaaattgtttggttccaagctggtacacagaagccttcacagaactgaggagggacagtttcagaaaaggagggtcaaaagtcttcaggctttctgactgcagacatgaggttacgtctcaatgctgcctcctgactctgtgttcccaagcaggagataccattccattaaaagggggcactgatgcctacctggtggggttgttgtagctatttaatgagaaaacacatattgaactagatggctcagagccaggccccaggaaacatgggctgtcttttctccagtagagaaagtagacagtcgaagacacgtgaacagactcgatgggagggaaaggtgaggctgtagcactaacatgctaaataggaagaaaagtggattgtgattctgtagtctgaagctctaagaggcctgggaagccattttggtagtctgtttccctcttgtctgccacatggaatatatcagctcccctgggtctgacttcctgggagacatgatgaatgagctgcagtcaggagcccttcattccccatttatcatctcttggcttactcaaaggagccctggctttccaacaggtgagttggattagatggattgtgtgttgtcaaaacagtaagtaatgggatgttgtggtcatccttttgtgatgtagaaacaggagacatttatgcatttcaagttagattaacagcaagctcaggaaatggacatttatggttcctgatccctctccccctacctgtcatacctgtttgtaaattaccaccctatagtaccttgttcaagttttagatctatattcttcttacaaaggtatttggaggaaatagacacaaaatcaggcattagttttgcctaaatagatatggtgggcagaaatctgtgatgatgatacttggttctgtctcagatgcttttcaattgctatgataaatcaccatgaccaattcatagaagaaagagtttatttttggtttacagctccagagggacaagagacattcaccaccacagcagggaagtgtggagtcagtcaggcatggcagagggagcagctgagaatgtctgtcttgaaaggcaagcaagaggcagagagagacaaccagaaatggcaagagcctttaagttctcaaagcccaccttgatgacatacttcctctgacaaggccacaccttctaagcctgccaaaaaaagcaccatctattggggaccaagtattcaaatgcctaagaatgtgaggcatatctattcaaaccaacacaagtgctttggttagttctatgaaatgaagcccattgaagagtgactctttgacaaatagttagagaacacaaacccaggttttgtacttggacatagactttggcactcaagagagttcggtttgaacttgggttctactttttgctatacttgtgatattgcactttttggttattttgagcaagtgtgtgtgtgtgtgtgtgtgtgtgtgtgtgtgtgtgtgtgtgtgtgtgtatgtgtgtgtgtgtgtgtgtgttacacatatatgtacatggaggcctggcattgatgccaggtatcttccttaatcagtctccatattatacattgaggcaaggtctctttggaaacctggaattcactgtttcagctagtccggctagctgatttgtgctagaaatttcctgtctctgcctttggtggattgggattacaggcaggctgtgacacccaccttgcttttatgtcagttctggggctctgaactctgatgtttagatccttacccttgctttatttactgagctagcacagtacttctgagccttcattttcatgaagttggtattgatagaagctgcctggtagaacttcttggaatgttaggcatgatgtatgtaaagtatcttccaattacagatgcctaatggatgctagctcccagaagggcagtgatgtctgtgcaggtaatccagtgtgcctgatttgcttagagtcaccttactctgttgaattgcttcaaagtactgctatccatatcacagtacgcatgtttgtgggaagttgttattataatacgtagagtcataagagtcacaaataactttatgaagtaatagctataaagcacttgaacacatgcgtatatgcaggtaccagataagggaattataagagggtccaatggagattaagctgagcttgcagttttctctgtccagaggaccagcaataattttgggtcctgggaggtggaactcttgaatgggacaggttgtagttgtcacctacagagatagtcttggaagagcacattgcattttaataactggcttctcttagaagggtgcatgaggctctgtataaggtgggtcatttcttaacacgagtagtagtttccagtttctactttgaattttgctatttttattgggaatagaaatttttagaggagaatacaaaaagctctaaacataaaggggaagttaagaatgcatattcataaagggacacaacatttgaaaagagaagccgtggagaagagagataactggcaactcctatagttggcaaagggcttccgtgtgagtatgtgaaaacaccccctacaaacccaggcatgagaaaaacaggcagttgaaatgcaggggaaattcaaatgaccaaaaacaatagacaatatgctaattagcaatcagaaaaataaactgtaaagcacaatgaaacatcattatgcattttctacaaaggctaacactaaatagactgacaataactgacaacatggaacagagcaaagtttcagacacagtgggagggaagatgatttggtaaactattcactggaagtttatgtaatccactaaagttgaagctatacttacaagactaaccattgactttaatctgaagagtagattcaacagaatattcattactatttttaatagccctgagctggaatcagtccaaatgcccaagtgaatagtgatctaattccatactggtgccctgggcctccatgaaaatcatcatactgtagctactttgagcatcattgatgccattcatattcaaaatattaccaaaaagctcaatattatcctaattacctaaagaagagagtgttttaacctcaggtttttaaagatgaacatttaagcagcaaaatcatgaaaaaaggaggcaattaccgtaaacactgccatctgctagagctctgtttcgctgtcgggacagctgattatggtgtcaggacatacctggttaacagtctaaaatcagcaagagatggaatattcacacgacagaaactaacaaagtctgtaaatttaggcgctttctactcgatacagagtccttaaacacatcctagcacatcactgtctgagaggcatggtactgttctctttcatggccagcagaagatagttattaggaactgctatatttggatctttttagctgctggaaatcattgagcttattagctgaaactttaggtgtatgtagactttctggtatgagttatatgacagagttgtctggtttttcagaaactaaaagacattcagtaagacaaggaaaaaaatgacaggaaaggtagaatcatcagacccactatgtgctcgctgccctgtagcagggtttttttttttgtggggatagaatggaatcagttctgtcaggggatttgtgaagtgcaagatgctgaaccaactgtcaagtggtgtggtattccaggggtgagctgtgtgttgagaagggtctgtgtgaattgggggagataggggaaggacatgcatacatagttccacctagcactgagggagggacttggccctttgtagactacagcagcctgttcaggggtatggacaaaagtggcaggaccccaagatggaccagaatcctaggactgtgtaggagtagtcttcaatggtggtaacaggaagcaatgatgataataacaaacaagcagatctgacctacttttttttttttttttttttcttttttggtttttcaagacagggtttctgtgtgtagtcctggatgccctggaactcactccaaggaccagactggccttaaactcacagagaccctcctgcctctacttggattaaagatgtgtgccaccaccatcagggctgacctattccttgtctcacatagatgtgcgagtaagactgcccttttgtattgggtacccaaaaggggagtttcagaataactgaccgggacagaagtacctagttttctttctttctttctttctttctttctttctttctttctttctttctttctttctttctttctgtacatcctagttttcatatgaattaccaaggtaaaatgtatctttacactgtagaatacctggtggtgaccacattaaccatgtgatcaaggacagcatcccttctaatgggaatagttaacttggtgacctcttggtgtgaaagatatttgtaaagtattctcaagcaagcctactttccccctccctccctccctccctccctcccttctttcttttttgtgccaccaggctttgaacacaaggttttgtgtatactacacacacactctaccactgagtaacagccccatctttatcaaatttgtttaatcagagtatgatctaactatcagtttagcggccatacagaggctaggggaacatgacaaagacaatgggaaacaactacacgggttcagaatgtgggacagtcaacaagacagttgggctgcagtctttggaaactcaatttcatgagaattaagagtgtgctgtgggagcagctgttgtctgaaaggctaaagagctgtgacaatcaaatgtactggctcagaaaatacaaatagtcacaagagtcaatttggaaacaattatggaattcgacttggactaaatgttaggtaacattaggatcgctgttgctgtcttgtgcatgataacaccatagcaaccacagaggggaggtttcattcttgggagatatgttcaagtctacagaagtgcagtgtttgattaatatggctttagaaggaaatttataaagagatggaagaagcaagcagcaaaacgttgatgattgttgtaaatatggagaatgtgtagatgttcactctcttattctttctgtaattctgtatgctcaacaataattaggaaatagaggagctggagagagatagctcagaggtcctaaggacctgggtttgattcttagcactcccatggcagtttacaactatctgtgactccagtttcaggagatctaacatgttcttctgtactccctggacaccctgtgtgaatgtggtatgcagacatatatgcagggaaaatacacatacccatacaagtaaataaaagaaatagaggaagcaagataactttgggggaatcaaagaatcccctggaacaaccaagagatgtgacaattgtgcacatggatcagcagcttatgatcacatgaattttgttcactaagagcaccctttgtgacagagagcaatgcatcaaacccacggggctgtgataggcaaggctgcttgctttcaaagggtggtgctcctattagcagccagtggagcaggagacagatttctagacaatctgaggtgactaccacgttctcatttgcaggcacagcttactcttgcagtcactattttccagcagacttagaaggtgcagactgtccctctgtctgcatcaggaatagcttgacttgcttactttgtttggtgtgtttgttagcagctgtggagagcagagagcgatgagtgtgtgcctgctgcctgcagtattgctgcagacagctgtcagctgggtctcctctgcaaacagaggctccagctgactgtactttccatttgacagcctgcatggggtcctgttgggtcttaacctgggcttccaagaggtcttcccttggtgacagtggatgagctttagctattctgtgatcctctttaaataattgtacataccttaggtctctcccaccccctaagtgttccaagctttcagcacatcacagtaaatgattataaatcaagaacttaaggaatcacagacccagtccaacctgtaaatctctgtagcagacagaggaattgtgagaatgtgttaggaaagagatcagataggattttggaatttttgaagtgcccatgtaacacgatagagatgacctgcttttcgtccactgcagactgagctaatggcccagcaaaattgattgaataaaactgaaccacaggagcttttattctcagcctagaagcccagaaagcagagacaagtctgattgaaagcctacaacaggaaaccgagctcttctagtctccagaagtcagtgacaacagccatagtggctcatgtctgtaatctcagcacttagagaacatgggaagaacaattactgtaagcttggggggcagccagagttacagagtgagacctctgactccaaaacaatgaaaaagaaacaaaactgtgtgtgcacgagtgagtgcctgtgtgtgttaacatactccatttcttcatccactctcctctctacctagtctatatttgtcctgtttagcaaaatgagacctttggtagaactgacacaaggggtaccagagatcagttttatttgtgaaacagggaaaacactttagggaaagagacatagttgtgttcagtaaataaacaaggtaagcaggtgtggtggcatatatggttaatactggcagagataggtggatctctgtgagtttgagaccagcctgggctacatagggagttccaggacagccagggctatgtagagagattcttgtcttaaaaagaaaaaaaaaaaagaaaaaaaaaagaaaaaaaagaaaacaaaataagcaagataagagagaccagagatttttaaagtaaacttgagtttgacaggatgagggtgtgggcagagagaacagaaccataagcaagaacaatgtaatttagatcatgttgggaaggcatctgggtgttgtagggaaggaccctttgggtccctaggctgcctctcctacaaggtgggatggttctgggttgtgtggcttgctgctctcgtttgccagtctctcagtcagcatatctttctgtcagctgctcatgagcattgtgacatggaggccttccattgaaaccctcctacagcttcttccatggccaagttagctttcacagcatgcctgagatgccacagagggacaactgttgcatattttctgccgatattagattaaaggctcacagagagcttgctcaaacctatctcacagggaagaatactgttggccacagtccccaaatacttttgagctcaggcgtatttcaagtgaaaggtctcatgtatctttgattttagtcttgtgttgtcttgtcattctttgggttaaggactgttagcatttcttcattcaattcactcatttgactttgtttcatagtttatttgcatattcacttatctatggaggggtgttggctcacagtgacaacacacaatttccctctctgtatttctaggatcacatttgagacttaagaccttggtgtcatcttcagttttcccctttttattggtgagtgtctcttcttgctctgttatgtctatccaggagattcttccacatttagcattctctgcagcccttttatctcactggtgagtcttgcctgtttcccacattagctcttctattgtttgcccttttgagtcatctttagttctagcccagatcagatttttctgcacttgtctttctttgcttaccacacattggagtgtactccagccccaatgagtcccttaccaccttccagagtctgcagcatcttcacgctgctaggattttcgaaaaactatgccatgcccttttcatcaaatcttccccttaccttggcatttcacccattcttcacaattgagatattctaattcaaatctcacccttcctgagaaacgccccctggttcctccaacttggctctgtattcattgcaaatgtgaatgtacattaaaagcatacctacacccaaaggaaatttgtttatattatttatttatggtgcttagcaaaatcaggttcatatggtgacatgagttaatgctactcagtagggaatttgccaagggcctgagatgaaacatgcatttatttctttattcattcagtatcaggccctcatttgggccctaagaatgtgccaaggatctgtctctaaggactgtcttgagaaagatgggggccaaagagcagaggatagaagtaaggcctgaaggctgggaagcaaggaaagatcattggggtaggttagacaatgctccacagaaggatcgatggtgaagctgaaggacatagagcattgttaattttaactggaactttttttcccccacatctcgaagccagaatttttttgaccaatgtatacacttcatatgccaatgtttctctccaagcaccaagcttggaagtataggtaccaccacacccagctcaataccctatgtcttatcggtactcatgaggctgaggcaagagggtcatgagttttaagccagcctgggctacaacgtatcacaaagataaagaaaaatgtgcaatagtaagattcctgaggctacacaatatagcttcactttaaaaaatgctgggtgtggggttggttgcagtgtgtctattcccaactgctgccctgagaagtcattgtgatgctctcacagttctgcaggccatcaattcagatgcgttttaaggacctttaaccaagatggcagcaggtctgattctttctagggactctaggggaggagtctagtcctcatcttttccagcttctagaaggcctcctgcattcccgggcttccggcctcttcttccaatttacttctgttgtccctggacttctgactctgacccctctccttccaatcagatccacatgaataatacagggtcatttccctatatcaggacactcaccctgacaaaacaagctaatagccacaggttttggggattagaacaaaggtatcttcagggacataattcaatgtatgacagaagtatttattttaaggctactgctatgtttttagagcctaagtgtgggattatagctacatctcaggaagaatctagaatctttttggttcctacatctgctcctgtcttcgtgactatattcctctctcttgttcttggcagactgattcactctgcaacttagccaacttgtaggagcatgactgctgacaacccaagggtctaggctgcacttttattatccagctgcccctttgtacagtctctagtcccaatttccaagagaactaattgttccgtttattactactactatcatccttgttattatcttttgatctcacaatgtaacccaaactgaacttgatcagtctacttcccaagtgctgggattacaggcatgcaccaccagggctagttgattggcactcttagatgaagcccatcaagccaagaatgtggcagcttaagacagagcttcagccggagcatagagctgttctctatggcacaaacactactggaaagcaagcatttgaggcataggccttgggcatgtactcaggcatagttctttactgagaaagacttagctcaccagatgttgagtgagagggtgctgtttccgataaagggcagtggcatctggtcagtgtttgtcaaatggtaggcattcaaggggcatttatgaaattgcattgtgcagcttcctttcacttctgcctggaagggagtccttcagcaggtcccactgtgcctcctcctctacctgccacattgtcatgtgccacatgctctgtctagaattcttcagccatttccttcctggcacaggaagaaactagcctgacactgttgtatggaatgatgaatctccttttctctacccaggacagaataacaatgccaacatcatagaaatgttgaaaggattgagtgaattgaagaggccactgtacttaacagcacctctcggtggtaagttctccacacagagcaggatggcttcctacttctccactaggaactggtttcattttttttctcatggtggagtcttgttttacctgggactctagccttggaaatacctgaccctaatcttgtctttagtcttccttattcctttaggttctgccaggctggaggcttcgttctttcctcttaattctgaagattttccagtcctgttctacagtctcagaataggttatgtagtccaatttcccacctaaatgtgggaaaccatccacgcactgtcttccccgaggccattagcttctacttgagcgctttgaatgctgatgaaccatactcaggctgcttgttcccattttttttcaacagctctaattaaataatgaaaacatgcaattatctttttagtcatgactgtcttgcctttttaataaaaatttcagttctttcacaggaacaaagtaactgctcaaaaggcattgattatatttatgccttaaatgataattccctgacattagtagttaaaccatttctcccactttcttctaactaacaccatttgttggaggagatggcttgcatccgaagccttgtgattattggatgatgcctgcaatggagtttaacacaaagacagtaaggaaaaccttccaactgaggtggatgcctcttatatgacacccaactttgcttaggcactttctgttcctccctcccttcccccccccctctgagggagtctctctacatagccctggctcccatgaactatatagagcagcctggccttgaattcacagagatccgcctgcctctactttctgagtgctagaattaaagctgtggaccccccagcttcaggtcacttttgattcctctcacacttttgaattttcaaaagggaaaactatattataacaactttactatgtcttgagacatatctgcagtcttttcatgacttatatggaaatatatccacatctttatatctggtttggatttttacagaaattgggatcaaaccatatattctcctctgtattgatttgtgtgtgtgtatgggggtgggggtaatttggggatgaacacagagccttgtaatactagtcaagggtctaccactgagctatcattaccatataaccagcacctattgttgttattattatcatcatcactagggtgggtttgtgttacctatttatttttttaagattaggcatctctgtatgtctctggctgccaggaacactctatgaagacccatttgtcctcaaactcacagagatctgcctggttctttcttctgagtgctgggataaaggtgtggactaccatgactggcatcatttcttaagacagttgcccaagctggcctcacatttgtggcactcctgcctcagcctcctaagttctgggattattagtatgagccaccatactggaatgtatttttagttttgaaacagggtcttactatattaggttggcctcaaactcactatgtagttcctttaaaaaatttttatttcttattttttgtgtgtatggcatgtgtgaatatgtgggttttatgtgtcctggcatatgtgtggaggtcaggggcacactttcaggggttgggtctctccctctgcctgtatggggttcttgggattgaactgaggttatcaagcttgtgtggtaagcctactgagccatctcaatgtcccctgtattgtctttcaaaaagaaaatagaacaataatgaattttcatgtgaagacataaaaatttaaaagtttaatagcttcatgtttggcataactactttatcatttttttttccttttggttaacccatttattgttttagattgattcttcgattctgttttttttttttttccccttggaaggcatgagaaagaacaatgacttctgtaaacttatgtacaaattcactcaccattgcaatttgaatttgttccttccccaaatccatatgtaaatgtcctagcactgagtacttcagatatgaccttattagggaaaaaagatcattgtaggtggaattagtcagggtgcagggaggtggtgggctaatataacaggatttggactcttgtaaaaaggagacatttggagacaaaacatggggagaatatcatgtggcataaagacagagcccagtgtcagaaaacaccacaaagcaggcaagaccatggagaagagtctctcttaggtcctttgaagggaacaaacttactgccatctttactttggactcaaaaatctccgggaatttgagacgatgaatttctattgttttaagtttccaagtttatgctactttgttaagaaagttgtagaaaactaatatatataactttagaaaatgagcgcttaatatttgagacagagcatgatagaacactattctgatttcaagtgacaccctttctaagataactgagtaccattagtctctatctcaacaatatattgaaatattatgacacgatacagcccacagcttcaaggaaatggcttgagctttaacatttgggtaaaagtcaactaaccagtgatttaggaaggtaaaaaaataactactaaaaaatccagtgataagattgtggttctcaaatactttccttatatggcagaccaggttttctggctttcaattaagtgaggtaacatgtacaaaaaataatgataactatctctacagaatttattctttccatttgcatcagtatctcattcaaggaagacccatactggtctatatttgagattttccagggttctttattgaatgctatgtgtgtgttatggtatctatgtgagttcaagagctcaacaagttgctttagaaaatggtgttaaccattccattacaaaggaattagctcagtccaatgtagcactgcccccaccaggagaacatttcttctcccgagccataaaacattcactcctccaaatccctagacttgttttttcatactttattgcttgggcaactaaatgataatgatatgatccccctctcaggacagttgtatgtaaagcctcacaagaacacagacctagtttacttattcatattggtatctttgggggcacaaagtaattttcaaaatggaataactaggcaaaatagtatgcacttgtagtcttagctaactagaatggggaggcaggaggatctcaagtccaggagttctgtgccagcctgtgtaacaaagtgaggccctgttgaatgaatgaatgaatgaatgtgtatataatttgtaatgtatttcctatgctttttaaaaaagtaaaacatttataaaggcaagggccttagatgtgatatctttcaatttgaaaatgtttcaaatttaaaaagcacaccacattggcctataatatccattctttgctggtgaacacaccccatagttgaacagtttgtaacttctatttttccagaatgagtaattcatggagctccgggaaatgattccctaggaaccaacaggggctttagcatgagaacggtggggaccagatagagacacataaatgcacaaggaactctgagtcatgttttaaactattcgtatttttttttattgaaaacatttgttacagaaattccagaaagttctttgcctgtagtatctgccaacttctgcttcaaattatatatctaaacagacaagctcaaagtgcattgtgaatccagtaacagactgttaaaaaagaacaatgcctatatatatatatatatatatatatattatatatatatatatattcatagtgtcagtagatatgcaaacctctttctatcttacatgaaagaaggaaaagatgtatgtatatttagtaaacccaatttcaaaatcattgtatttataggaattcatttaaaaatggtatctgaataatttcccccattataaactatggttagagcatttacaagtgacagtctaagtgctagattaggaaatggctatgagtatagtgtactgactacacggactgtcttacacagtggtagcagcaatataaactcagggcagatgccccagtgacaggaagcaagtcttcacatgctacaacatccttcctcatagccttcctcacactgatcctatgtttggatacagtaaaacatgctaatcaacacacatggaagtcatccaggagtcaccccaaataggttgagctgcttctcccaactcgaagtccttcagtgtatttgatgtgttccagaatcatgaatcagaccctgccttggctccacatcagagacccccaaacatggccattgaaatactgctggcagacatgtatgtggctaatacaggggttgaaaatcccaatttttaatctttctgtgcgatgtatatgttttcatgctcaacaaatcttgctggcattgtcttctctaggcccattcctttgcattctagctctgggtcttggattgagtttgtaaccccttcatggagaggcagatgactaggtgaagatgtagagagcctttcgggattcagataggcaattcagaatcagatgtgacaggtgccacagcagccacgttaggaagtggttagagggaggaggtaaagtcagctggaaggccaaattcagaaaatctggctttttccatgtagttgatgtttgggggtactgttttggggtccacagggatatgaggtaatgaatgagtctgttggtctcacacactcggaaaaaaaaaaaaaaaggagctagctttagactaagaaaaaagaaagaaaacgaaaaaggctgtgcccccaagcctttccatcacattcttcagcaatctgcctccccaggggctggcgtcatggctggcactgatgcccctcagagtctatgggcatcagacatccatcctttcacatttcatgaaggggatcatgtgctgccagcagaaggcagccagttattccaggaaagttaggaaaggtacacacctcttctgattaatctggatgatctggtcacctacacctctgtacagatgacacacagacatccgtacatcttgatttctactaggggtaaccagtgcaaagaagtcaggagagcaaaggtgacactaacgctcagaagtggatttggaaaagaaaagaaaaagttgttcttcttttatcagagccaacccctcttttgttgactccaatctgagagacaggatgcttgactcgtagacacaagagacagcacagggcagagctggtggagagaaaggtttccctgctcatcttggaagcatttagactgtgcaagttggatccatccctttccagacgttgaagggcttataacaatggaacagcgtcttgtttaaagaataaactctttggagtcacctggtgcttcattagacaatcactccattcccacctttgggcccagtcacccacaggctgtgaaagccacaggacgagaagggaggtctcagccattaccgttgagaccattctctcatagtgatctgtgcatttctgtcctgtcacgatggacctttggctttcatctctggtttagcaattttcacccaggaagccctaaagaatccaagatgtgtctttcatatatcacagatgtccccacacctagaccttgggactccagagtggtgctggcttgccatctttgggtcccctagctattgcaacttgcagttgatactttatttcatattatttgttcagagctttacaaaattgaaaaaaaaaaaccttgattacttgttttttcattttgaaaactgaaagtagccccagtttaagaagcccaacaatctgagtgggtccctaactggcttaagcattgcagcagacaagagtataatgtaagtgcattaaagagtcaaaagaaagccatacagcacagcgtgcattgtgccgacacaaaattaagactgggttcagagaaggattacttcagtcaagtcacattattactgtaaagcttagtgagttgaatgcagtatctaggccaagtatacagccgcctaaacgtgagcatcattttatctagaacagacagcgttactgaatgaacgtatttataaaatactgtacactgcttccacatggggccagcagatgtaaacaacacagctaattcaactggactttaaaatatttaagttcatttgtttgatagtgttttgcataacatgccagcttgcctctcacagagccatgccctgcctcgcacagctggtgggacctggtagaagatgcacatcagcatatacaaatatttgacagtagtctgaggcatgtgaactacataatgaagaccaggaacaaaaatgcccattaccggagctgctaaataacatggaaatgggagcggagttaatccttgccatatgtgcttctttattgaatgttacagatttataaatgattataaagctgtcctgtaacgttcattaacacaaccacatgctacaactatgctgggttaaacacaggttacagataggtttacatgtgttttataatacagcattgcccaacatgtcacatggcatagcctatagatatagcatgatggataactggataatattatctttaaagaaatcaaacagcccaaatatccaggaagattagattgtacagctgcagaaaggagaaagaaacgtactatccagtgatctaccataatgttatctatagaaatcagattttaaagtacatttgtaacattcagaagaaacacattttgtgttttcacaagtatacccccctcccatttcattattctggtatatgtatatatatatatatatttttttcttttaaaggggaaactttcaaagtgctaaataataactggtcctggaagcttcaactttaaagaaacacccagttctataaagtgccgcactctgactgtcctccttttggcttgcagaaacacaaactggccatgacaattatcctcttgctttctagcactccattcaaacccatcagtttctaaccataaatataaaatatggccatttttataaaacatccttcatttctttcctcaaaggaacaagcaagcaatttagaacaaatcattacacatcgcagtatataaaaattggcacctatgaagcagacgattaaataagctatctctttcttgagccctctatgactttatttatgtatggtcctcaatgattggctgctcatgagcttcgtagttcacaaagtggggaattaaggtctcctctgtcagggacatggtagaacaaatgaacacaagctgtctgtacaaggccacagaatcaatgccacactggtgctcggagaacccagaaatggaagaagatgggattgaaaataacacacacgcatgtgcacaggaaagagatggcttatgaggcctacacagtttgtgtctaaagttgtttacatttggcttagagatttcacacacttcaccaaggaggttagcacttaattttcatgcagaatgaaagctcaggactgttaagtgtttcctttcccaggtcacgttctttctctcaggtgatcacaacaaacagaaacactcaggcttgtcctttctttctctcccttgaggtcccaagccaggccccatggtgcttggtaccctgctctatggtcacagatgatgacttcatttccttgggctcctctatggattccaggcaaagactctgaggatgcttgctactcagtcatgaaaatgttagggcgcaatgatatccagctaaccatatctattctaaggaacagaagggctgagactcagccttccagagaatcacagggaagtggtgtacaagtgtatcgtgcctattccagcttgactgatggtgaacaaggtgtctatcctcatcagtcactgtggaaccaggggagtcatgaatcccttaaagttaccttgtgccttaacatggatgcaaatttggggtatgtgtgtgtgtgtgtgttgggggggggggtagagggttcagagtttccatgaggttttcgcagggattcatggctcaaggaagcttagtgtcaaatgatttactttttaggttcaacacatgtctgctgggagggagatcaccaattaggaagtgtctctagtgtagttatcaatgaagaggttgggcattacctaaagtcaaggatgaaacaggattcttcacatatgtgagcttgccacttttttttttcagctgaaaagcttgtttcttaaatttttttttttttttttttttttttttttaaagctcagaggttttgtgagggattgagttgacttcaccaaatgagatacaccttggtgtttacagctacagttaaaagaaccagggggcatctggggccaggggcatgaaaacatgttctgttttctctttccctctcttcctcctcctggggatggaacatagggccttgagtatgctaagtgagtgctgggccactgagcccaatccctagttcaaaatacttttcttttacaatgtttttttttctttctttcctttttttttttttttttttttttttttttttgtgtgtgtgtgtgtgtgtgtgtgtgtgtgtgacagggtctcatgtagccttggatgtggtatgtagcagaggctgactctgaattcctcatcctcctgcctcttccctcccagtgctgggtcacaggtgtgcatcaccactacgcctggctccaaataatttttcttaaagactttatcttaaaatgttcaatgatccaaataggaatccaaagttttgtggtcaagatttcttcatcctatttcaaatctgaattctaatctagaaacttacgcctccattccagactgtgtaatacaaacaggcttgcaatcacacatctattcagattgtattttgtgggaataacttcatgtccgagaaaccagagtgaaagagatgtcatgacattggatgcctccaaaccagaggagggagagggaaggggtgagccattttgacagttcttgttcagtgtaagggaagattaaagagacagagattttctggaaagtattatttcaacagtggggccaatagcacaatgaactatttttccaacaaaactccttggatactaaaaaataatcttggttatacctccagatgacaggaagtcaaggccacttaagaaatctctgtgtctattactctatataaacatgtgtctgtgtatgtggatgtatacataagcaacataaactatagaactgtatatggtatatttgctttctattttggcctactgtatcttctttagagctccgtaaataagaaatatattcatggtctgcctgcagctgatgatggctttgggttgatgtcaagcccctagtcaagtctatggttatttatgttttttaaatttctttaaaaagtactttggagttgggttgtgatggcacaagcctttaatcccagcactagggaggcagaagcaggcagatctctgtgagttgaaggccagcctggtctacaaagtgagtttcaggacagccagagctgttacacagagaaaccctgtctcaaaaacaaaaacaagagtactttggaacatttccataaaaaagataccagcccttgaaaaactccgattaaatttatgctgagcccaagattagatggctaaattctacgtatgaaaatatccacatataaccatgtgttcaaatacaaaatggtcacatgatgagtggtgtgaaaatttggcagttacatcttggaggtgttcggaggacatagtggagacatgcaaatgatgaaggccacacagcagcatcacacacgatgaatggcgagacgctaacaataatcccacgtggcaatttaatgtcagttctttccacttttttttttagttcaatattacatatttgatagtgaattcactgatgacaggtgagatacaaaataacttaaaaatataaaattatctaattacattcatcctgagcttgcttgactatatacttgattgcccatggtatattataaatcataagacttttgctttcaacattaattcttctttcattttgattgcaaaaccaaaagagaaaaaaaaaaggcatttctgttcccttattttcttctacagagataaacaattgtggcaccagaagtgaatatataagagacaggtgaactgtatatatgactgttaccttgtttttctttataatgaccaattacagaagtgttggcatgagaaggatgtgggacgttaggtagaactgcttgctgccggcttacactgaataaaaaggatgctcttcatcagtcaccagtgatggaaccaatgtgaaaagaaaacagaattgaagtttagaatatctcatcttgtatgctggctactttatctcattttgcaatttagccctgtctcctcaactcttgataacagggcagaagtcccaagaggcctgccggcatggagaatgcttgagcccatttgttccccagagctcatggccttctgtggtgcctgatgatgacacacattcctctctaacccctttctgtcccctcccttcccagcaagtgtgaacatgccttcaaaccctgaatttggcactgggccagatggaaagcttgcttgacctgtggcccgaggttacctttgagttaacatctcccaaggcattgttttgctcagctaagagtaaagcaggtataactcaaggaagggggaacaaggtgggcatggggagaattttagtgctggattcttgagcctcctgcaacacatggtaagaaggtttagttgtgcttgctttcaaagctatgaaaagccgatgttctagacagtctcctcatggataagctatcccctcggccctccggcttggaggacttacttctctggaagggatttcgtaggcttgaggtgttcctctgtctatcaagcttgtcactgatggagaagctcttcctggtatgtgcatatggcgcgtttggctcctctgccgagtagctgttggcgcgctctatcttgggaactgtgatgttgttggatagggttctgtctgcattttcagcctcctgagacgagattggattggcagctctccggcctctggcctcattttcctcactgtcagagctaggatggctcagctctgcttctcgctcagggtggcaactagataagtcctctactttgtctccgagacccccagggaaggtggctctgtcagcaattgcttgaggggcattgacacaccttgtgtcgatacagtctgtaatacttgtgtattctgctgttttcacgggcaccccaaagttggcatagtaactccttgaaggagaaaacataaagctatgggattttacaatgggggcctcttccagaagaaatggtgtggttgctaggtagcggctactcttggaacgctcgatggtatggtacattggagggtctgtgtcccaggggttttggcattctgggaggtgggtatagtctgaagaaaaagatctagtgtccatggaggtgaggtcttcaaaatcaatgctcctgcttggaggtcggtctgtaggtgcaagggttgcataggcactacttgaaggggctgtggatggggctagagctgaaaagcttggctcgcccagcccaaggatgttcatggaattatccagagggtctatatcactgtggagctcatccatggcagagacatagatgtctatgcatgacgatggtcttctggaatcaggaacaatggccaaggtgtttgcaggggctgcaggagctttgggttcttttgctactgagtgggagctagtagctcggtgtaagctcagggacctttctttgaaaatgctttccaacttttctataccacctttgtctttcacattgactgaatagaaagaatggcttcgcatacggggcattaaggttggagaagttggggacatggtctcctcacctgcagggtctatactctcttgaagtttgaaggtgttcccctcctggctgttgaagctgctctggcggacaatgtaggccgcatctgtgcaatctgaggaggtccttgagcggatcttgttggactctgcccgctccagacccgttaggcgctccagggccgtggccatgcgcccgattaggtcctccagctgtgccagccggatgtccacagtctggagtgaagccttcatagagtgttctctctcattaacttcctccagcctcatggacatgttctccaccctgtgccgagaagcagagagtaagagtcatttgggtcagggccctctgctgggggaggtagaggataaagctagaagacggaaaagctttgctcttctccaagaggaaatcagcaaggggttatgggtaaagggaggggctgatggggagagatcgcagggattatgggtaaagagaggggctgacagggagagatcgcagggattataggtaaagggaggggctggaggggaaagagtatgctatgtagatcaggctgaccttgaactcacaaagatcttcctgcttctgcctcctgagtactgggattaaaggctcatgaactatttttaaccaattctcactacttctctgcactcctatgtagttggtatgttaagtcttatagaaaacagggagggccagtgttaatccatttttaatgatgggaggagcatggacctaatggcaaggaacttaatgtagagtcaaatttactttatgtttattctagacagcttcttttattttttccttttgtaaatttaaattagaaacaatcttattttatatatcaatcccagttccctcttcctcccattctcccatgccctccaccaacccccatcccatccttcttctgctccttagaaaggacgaggccttctatggggatcatcaaagtctgtcacatcatttggggcagggcatagtaggccctccccaatgtgtctaggctgagagagtatccctccatgaggaatgggctcccaatgtccatttgcacactaggtataaatgcttagatagtttcttttaaacttactctttttttccttgaaaagtttgggaccagtgagatagctcagcaggtaaagtctgatgatctgaatttgatccctggatgtacatgatgggagaaagaagctacccctgcaagttgtcctctgacctccacatccacacgcacacacagaacccaccaagaattcttagtcatggctgcagccagccagtgctgattatggtcaaatagcttaagtgaagaatgcagacacaggagataagaatttacacatcaataggaatccccaagagatagacacatacagtgactaagaaagaaggtcattgtgaaaaaaatcacaatgttatatggaaagaaacctgtctttagctttccttctgtccctcacatctctagatggaaattggttcatttcagattaactcagaaggtgatgacgacagggtacagagaagatgagaggtagcacatgcccatgagaaaggaataagctcttagctcttctgatttcaaatccctgcactcaggttgtataacacaaaggtacagttacataatattctctctgtcaaaaggactgtgtacaatcagtagtgaaatgcaaccataagcattcctaccgatgtagctacacacaggcacacatgtgtgcagatctcttttcccaactgcctttgtctctgttaagaggctgtggataaggcaggtgatgtgagctgctactccactcagaacagacatatcctggaggatactgaggcagccaatatggatgccttggtctcttggtgggttcccaatgcacccgagccattccattgttggaagatgctagtttttggttttcttagaaatgcaaagaacccaacaatagccacagtatagctccaaaaccaggaagaagcctcagaagtagaggcttcttgtggcccagggcttgctcaggaggccatgctggttcttgaggcctggtcttcctattgcccctgaaccagaagggcaggcttctgcttcatttgcattcctggtaccttctcacttcactcacactctgagaaactaccctggcaggtcagggtagggagcagtccttcagggtttgctgacatggaaagactctggctccttcctgggtttcccagaaggagaggctgatatggtcatagtatatttatgtgtgctagcatctgggcctcttcatcctagttcctcagagaggcaaagccttcctggcatcttaatatgcctttcccatcctgcctttcttgcctcctaggcctacagtttttctgaattcaaaaagcatttcaaaggcccaaagacatatgctgaggaaatgtgtctcagctatggtaatattcccacatggcactattttctggaagcacacggatatatgtccattcataaacagctttccaaggcctcggaatgatcaagcgcttcagaatttcagcaccttcctctgtttgccagagaactgctttacagcatatcataaatctctctattttttggtggcagatgtgtgtaaaatctgtgcacagctttaactcttattaatgttggcttggtacctatggatacaatcattcattggcatatgtgattatacctatgtatgtagtctgagttctttaaagaaagagcaagggaccaaaaaattgcaatttatgtgatttctacacagttaataaagaatctttgatgtagacacacaaagtgccgtttcatggaggttagtaataagtcgctttaaatctttgacgtcccatgcacactgactgcagctaccagtctatgttgtcctctaaagtatttaccatttgctctttctgtcttcatagcacaaacagttaaagtgtagttacactagttctttgtgacactctctgagtgttcttttggaagctagtcccagattctaggttatgaatataccagcttggaatgatggttttattagtctatagtaacataagagacacaagaaaatgtaagagcagttgcctagatttagaagtgttccatatcaaagtttctgtcatgagtgtgtgcatgtgcgtgcgtgcgtgcgtgcgtgcgtgtgtgtgcgtgtgtgtatgtgtgtgtgtgtgtgttgcacattttttgggaggggtgggcagggtctctccatgaaccttgcattttttaagtcaagcaagacccagtgatcctactgtctctatccctgacaacaccatggccactggtgtgcatgaggccatacctgtcttgtgatggggctgagcccaggtactcgtgtttgtgcagagttttcatacagatctcttggctctcaaagccagttggtaagtgataagtgaatatggatagaaaactttgtactaatttctttgtttttaatcttgttctataaaaagaaaaacaacaaaaatacttcttggaaaaataccaatcattgttctcactgattgatagaacccttgctcttgcttatctagaaggcatggaacaccacataagctaagcatggggcttttctcttctggataagagcactcaataatctatattatggaacataaacctgttgaagagactaagttggggctgggtcttctttgctttatgtctgggacagaactttccagtttctggtccatgtcagatctgtcctagactcaccaatgcccctgtccaggcagaagctttcactgtctcctggaaaagtctgggactttgatctgtggactgatcagacaatgacctgttctttcagaaggtctgtgttttcttggacagtaaaaatacagataagaggtctgtgttttgaagatgtaacaactaattcatatggtaacatggacagtgttaggaagcatctgtgtgaggcagggtcagggaacacacctttctgatgtcacccgtatcctctcatcattggatgagttgaagcgatcatccttctctctgaaatactcttctatgcactgctcttcaaaatcgtgtactttcttgagctcatcatcagttatgaagagttctgagagggagaacaaaaagaaccatgagacagagcagggaccgccatggcatctggtctgtggcctaatgacaatttttaaagaaatccaggctgggaaaggtctatcagattctattgtgagttcatacagaatccaaatctaattaggcctcttgaaacaccagctccttcctgagctgcagttgttgtggtttctggagcccacttgggtatacctgggtaccacaggagctgggcttaattaaggaagtgacaggactgagagcatgaggaaaacgagggaaagaaagccactgggagcatgatagttcttaaaggctccaaattttctgggctgtgtagtgtgacatgccaatatgattgattaataatctttgtgcaacccaattctccccatctctttttccccctactatagaggtaggaaagccaaatagacacatttctagtcacccttgaaattatttccagccacaagactcagtttagagcaagaaacagaagaagtgtactgcagggaaggatggtatgttgggaagagattttgctagtgacaaaaaaaaaaaaaaaaaaagatatggttactctttctatactttttttcagcttcctttctttctcctgacttcaacataaacatttgatgatgaggggctcagcaactattctgtgatcttgaaaacaaactcacacaaaagggaaagctgagctgaaaactagaaggagtttgggtttttgacctcagagagccatggctgagttttggaccatctccttgctctctgttacataagaaaaagaagccttctttatttgtgctaatgttattctaggtttctaatagaaggtaaacgtctccatcaaacagggttagggcaagagagttgctgtggatattccccaaatcaggaagtctttctcatcctgggcccccgagatgctgtagggattggctcaaatattaggagggctgaatctcagctctgtgggcctttgtggccatagatctctcttgtttgtctagaaacctctgttggaacttgccaggggctgtaaaacatggttgataaggcggctgggactgtagaaaataccagaagtcagactgtgtttctcaaatatgacaggctcctaaggtgagggacagctgtgccaggtagggacacctgagatgtggtcatacagctacacagactatgaacatcagggtgaagaaggagagaggccatgtatagactccctccctgatcccaaagacccatgatgtttctaagatccaaaggcatagacccagtacttacttgacaccttacaacaagtgccttgtttgacttcttgactctatttgtagcatgagttctaataggtcttaataataaaaacccggagtcagagatctggttatatgctgaaagatcagagaagtaaaggagccagccactagagagaattcttacctctaccgaatcctcaaaccaaatgggtgatcctgtctccaggaatcctcagactgaatgctatgagcgtctatctcctcttgtcttatattcctctctctgcccagccataccactcccatctccacttccctactactgggattaaaggcatgtgatcctaagtgctgggatcaaaggtgtgagatctgtttctcttttagactggatcaaactcttgtagtccagggtggccttgaactcacagagatccacctgcttctgcctcccaagtgctgggataaaaggtgtgtaccaccactgcttggcctctatggttaactagtggctagctccacactctgattttcaggtaagctttctttgttaaaacaaatctctctctctctctctctctctctctctctctctctctctctctctctcctctctctctctcctctctctctctctctctctctctctctctctctctctctctctctctctctctctctctgtgtgtgtgtgtgtgtgtaggactgctgctgtttctgggcctgccatttatgtgcatgctctcagattcagtgtctcatgcttgtataaaaagcactttactgactgagccaaaccccaagccccatgctgctcttttttaaaaaaataaaatattctttaaaaaaccctattaccatgtcagattttaccctataactctaagtttactctttctgaggctcagcaagaacttggcagtgctctaggatcttttaatgacagctacagactgatggggaggacttctttcttccctgatgggtagaaacatgcagggcctgcctctctgctcttcactcctctcctcctgtcacagtttcaagatcttccttctgggaaggaagtctctgggaagtctgtcacctgctcctctctgccacatgtccagagacctggtgatacatccaatgctactctggctgaaaataagaaagccacgtatatggctgggggtggtggtgcccacctttagtaccagaacttgggaggatagagtgacttactaccaggatggtggtagcctgatttatatagtgagttacaaggtagccagggtttggtctatactgtgagacagggtctcaaaacataaaacaaaacacaaaaacaaatcacatgtattctagagtttggtggagcttctcggtatcattggacctatgaaatgtgctttgaagtagaaataggtctctgcagtgtcccaactatggtttgtacaagaaatatccctcttagaatcatgtgcttgcatagcttgtctttagagggtcatgatttttagggtatgtatagtctatctgggtcattttggatatatctttaagattcatagcctggccagggtgcctatttagtttttttctgctttctgatctcccaaggtatgaggagctgtgtgtccctcatacagttgcggctatggagacccatcaccactaggtcttccttgccataataaaccatgtctctctaaactgtgaaatatgaaaagtatctctccttttagcttcttctgttaggcatttggtcacaatgatgatgaaaataactcacacaggtctctgtcatgcacagtatttccagttattttgtgcttgatagctaagcaaagttttctaccagaaatgctcatgctttattgaaattgacttggagccctgagttgaccccagtgcaatattatctattattattgttaaatttattttaatcctgattgcagtttcccttccctcctctcctctcatcctattctcccataacactccacccaagtggaatattcttacaacattccttgcctaggatttgactatgctggtgtgatttgagtacaaaatatcagggcacccagctttctatttgcctaacctttatttcagaagggaatggtaatggaattgccaggtctttccaatggtctgatctgaatgtctagaaagaagatgggcattgctttgttagagagatgactaagagctttaggcttggagaagcagttgactaagggactctcgttttaaaccatggatatattggtatctcagggatggaggtagaatcctggacattatctcagaggcttctgcctgtggatttaacatagatgtagacttaacacatttggaaaaaacacagtagattgcctatatgttattgcatttccagtggctcctgagactgggtgcccagggggcatttaggagcctgcaggagcactgactggtacttaatgtgtaggggtggatatggtaagtcttctgcaatgagtcatacattcttacacagtgaggaactcttccagctcaatgccatccaaacttcccttcagaaacatcagtctagaaggagggtgataggtggtaggtagtaggtggcgaagaagctgttgttctctcctttgaaaacaaggctcgttctccacaaaatcatattggtataatgcttaaggtctagaaaacatttaagatctggactaagagttagccccagaaatgagcatggaagaataaaactcaggcctcactgtttaaaaatgatatctattatagcacttggtacatagtaatgtctgatttgtggggggacccttggaaagtaagaagtgtatgaaggtggcaaactagctctgttggagagtgctttttctcttactaagaagtggctaagaattctggcttcagctcatgctatgctgtcttccttctatcatgtatctcattaagcaggttcctttcccattcccctaaatacgcaggaggcaggagaaccaagaagggcaagggtccccctgactgcctatgggaattgctgggaacttccagctgcaggtgcaggcttgttgctcactcaggccgtagtctctttcatctgggtcactctcgtgctttctccaccggcaacacacatgttggaatatcatggtcatgtggctgaagatgatgagtggtgggggtagaactggcctctcgtggaaagtcatgatgagttggtacctctgaaatttccatacttggttggatatcgactttacctcaaaaaatgtattgctgaaacagaccagagagtcacatgaccaaaatcattactttttgaaatatcagctgcctccatccatgctgcccatccatccacccataggcctgaagaagtggccacttacttgaagacagcaataaggaggttgaccagaaggatgtttgccaccaggaggtagcaggccatgatggctggcacaatccatgctccagtcttacatgggggcagctggattgtcttgccatcttctcgggtctcattctgtccacagggagctagaggaagtgacacagttgaaaaaatgagaaaccatggaaattcaattgaaattagagagagttttcagatgaggggtttaaatggaagaaaaatacagccacctcaacacagcaaaaggtttcaaaaaagccaaaataggaaaatgagagcttcatgaatattcaaagggccaccactcttgaggagaggcggttccacctgtgtccccaatctgtcatcagactgtaagaggtatctagagccacctgcctggtcccttagtgccttggcccctggcagtggtaagggaggcatttggtattcctaaaatgcttggtgagggcttttggaggagccagggccagagtcctacctcctggcaagttactttcaaaatgtgctatagaggcctccagcggacagcttggagccaagcatggcaggctattgattggaaattaacaccagggcaactgttaattgctgtgagaaacaatccatggcctcagccaacaatttgctgtctcggtacagaaggaacagtacagggcggcacgctgggaagcgcctagagagcttggcaattggtgcccctgatggatgaggaggataatagcaaatggggtgacagggaaggaccacagaaccccgcactacttgtcttaaaaaaaaacaaaccaaccacattttcattccaagtatgtgcatttcagggacaagacataaaacctaactgtagcagtgactaaaaggcaaaggcagaggtccagggagatgaggaggtgggaatgaggaggaaggcgatgcgtgtcattgggtgagaagaagtaatgcactaatgagccagcgtggagtttccaggaaagggggggggcaataaggctttatagctcttcgaactgtggcttatagaacctgtctttgtgactgttctgttgttgctgtgaagagacacagtgaccaaaacaccttataaaaggaagcatttagccaaggggcctgcttacagtttcagagggttagtccatgaccatcatggtggggagcatgccaacagccaggcagccatagcctggagcagtagctaagagctcacatctgattcacagacacaaggcagagagagagagagagagagagagagagagagagagagagagagagagagagagagagagagactgggcctttgaacccagggacacatctcctcccacaaggccacacttcctccaacagggccatacctcctaattctttctcaacagtctaccagcagggaaccaaacattcaaatatatgagcctttgggggccattctcatgcaaaccaccacagagccagacttgcttgtagggactaagggtaggtaggtagcccttgctgtccagctgctttaccttggcctttgaacagggtaccctaatgcctgttagcagtgggtaagagcacccagaaggcttcagcagctcctgtaggcttctgcctaggatctggaaggagggttggcatggtgaatctacaaggcttgagcagtacagcaagggggccctttcttctccagaactccttctgccaggcattgcactctgcaggttctcagctctgaatacccaggggtcacccagcagttggaaacactaccaacacccagcttttacccagaattgaaccagaagccccctggagtcataggtatgccattttttcttaacatttcttgtcacttgctacagaggttgagtaactgagtttttagttaggctggaaaagtcacatgattttttattttttaaattaaaacatacctttgcagctggaaagggttttattagcaccaggccaccaagatcctgattttatggccaggataagatagccaaagcactccctttggctctatatgccagataattggatgtaggaatgggtgttatgtagaaggcagaatattgttattgacatttgtagtactgaccacctacgacagccctgtaagagggtcttggaaagaaatctactgacaggtgatgtccaaagtctgcaggcggctctccaggcctatctcttctcacttctccctatgggacaacctggatcaagtttcttatagttcttggaaatctagtctcctctgacttcctgattttgagtcccattgtttctgttgcttccacatgaccttttgacaacttggccctactcccaagcttcacccagggtgtatctcttccctttagtgtgcgcctaccctcccactttctatccctgtagccaggattgggctggtcatatcctcaagctcctaacactcctgctgtttgtcttaggactctcacattgctgccactgcccaattacttgtctgtcccatacacgagattcccattggggcaattgttcttcaaggttaccctcttcttggctcagcaattcacatagcatgttcatatgcatcctggaatagtcagtgtttgttgactgagtaaagaaacctctttagtagctgtgcatgaactgctgtagtcctactaggttggttcagtctggcaggatagatgtgagggccagtctgaggaattagattctacattctacattctacagcaggaagtgcatcgtgaatgagttagatgttcctttttgtgacagtgataatgataataaaagtgagtcattaagaggcagcctttatttggtaatatcagcaaagaagctgtaagcgtgacaggcagcagttaatgcaaagcattgctccacgagggcttctaatgacagccttgttctgggtctttgtcggcactagaaagtgcaataactcaaatgcacagatgtccaccgctaatggagatgaacagggtgccttccagacctgacaagcagcagttattaggaaggatgctaagttacttcgatggtcctatgacaccagcaagttgctggggatgccccccaagcatatgcaccaagacagcacatggatggaagtttaggggtatgtgggctggccactatccctgtgtctccccatttcttacttttctcgctttgtacttgggtcctttctcttccaatacttttgcaaacatggattagtcaagttactaagtggcatgtggccatatccttctttgtcaatgacagttagtagagcccctgcagtagaaatagactctccctcctccactgtccttccttgaaaaagtgcattctgttgactcccgtgcactcacttccttcccccgaccccctcaattcataacaaaatgtaaggctatcaagtagaaaggaccatcatagagaccagaaattaatgaccaactaagacatgtaggaaacgagccctctccagttatatgaaccacacaagcctgtttttctaaagtcagttttaactgggttgttatcacttgcagtgaagactcctgatagcaggtaggtgtggtggtgcataactgcaatcctagcactaactagggaggctgacacaggaggaggcttgtgtgctggagcctcacatagacactaaaacattggggggatagctagaggaggaaccagctgatacagttaccctcaatccctccctgctcacagtcagtaaaacaagatgttcatattgagagccttggaatagcatagaaagatcaggagtggtacccactgacacagcatctgacctgaagttgaggctgaatctaagttttaggagccaaagcagagattcagctgctctcctccttccccaaaggaaaccacttaaagggtctagtccaataaagttgagcttttgtccaactgtggcctcggaaactggcaacattgcaaaatcaggagggcagatacaggtctgaacaggccaaatacttggacgtagccaccaaccctcagggcaaagaaagtgagttctagaagcggcaccatagggcaggtgtgagcccagaggggggatttggctgtaactgttgaatctgcacagttacagccaaatttgaagggatccctgtgctttatctatgtgggtcacactgacataccacagggaagaaacgggaagtgccagttcccgctaatgatgcattcataggtagaaatggacaattgggctttggaacacactgatgggctagtcacaatctggcaagaggatgtgggtgatgagaaaaactactcccatatgttgtggaacagcattccagtggttggagctgcccctccctcataagcctttatagtaattaagggggctgagcatatagcttatgataagagtacttacctatcgtgaataggactttgggttcaattcccataactgaaataggtagaacccaatctgaaataaggggcaacagcatctttcctagaatataagccctgagaccagagtttttgtgtctcttgtacaccaagctgaagaacacagcctcatgagtaccagctgcacatacaggtgctgaacagagagatgctgctaaacatggtgatactagacacctgaatgcagtgtcatgcgtttctctaagtgcaacctgatctctattaccaggtcagagcctgagtatctgttctatttactcctaggtcttatcaagcgctaccataacctactatcatagaaagcaaaacactgatagagaaaaaaataataggattttccttccaaagactttatccagaacaatgcaactctatatgctgttgtataaccctccatagcaagccagccttcctacctcatccagtactcatgacagacattgctaattaaaccttacattctctccctatcagtggagatgctactttggaatccttgtctagataaagagacttctcttgggaatatggtcaatgaactgtaattcacacaaggtgcaggaccatccttagccctttgcaaaatgggaatgcaagggttgggatgaaggatagctcctgtgtctcttaaggctcccactcaagtcctcaaggtttggttgacacttggcctatattcactctttctcatgtggccttgccagtatgctaacactaaccactgcatgctcaaatgcaagggtttgagcttgaggtatgatcttcataaatttttgacatgatagaaggtcagaaagcttcaaaacctttgccagtgtctcaggagaatttgtgaagaacaatggaaacatccgtacaagccaggtcaaggagagtctctttccttagtgcctctgaagagggaacaacacaaagatgaggggagcctctggactacacacaaaccaggggattctatagtagtttttttcttcttttttttgttcttatataagtaactagcctgagctgtttagatgaaggaagaggtcaatggtgctctttcaaggttagagaacaggggagagcaggttcagaagtaggaggagagactgatgtcccccaagtttagacactttccttttgtttttctctcttcctataatatgcataccacattgttccctcaaaatcagaaatattccaaagtaaagactggccaacgtttgaaatgactgacagttctcttaaagatgggacaaagagagctatttgttaagggccatcatttcctctcacatctgaaaaaaaggcctacaagcttaatcctaaaccacaagacaacggaataaagagttagctgaatagctgatgttttgtttgtttgtttttgagacagggtttctctatagctttggtgcctgtcctggaactcactctatagaccaggctagcctggaactcacagagatctgcctgtctctgcctcccgagtgtaccaccactgcccaacaaatatctgacttttaaaattctatttactttttaagaaaatgattttaaactaaaaatctgttttgcaggctggcaatatgactcagtgagtaaaggagcctgtatcaacctgatgatttaagatccatccctgggtcccacatggtagaagagaactaacttctgtaagttgtcctctgactttcacatatgcaccatgacccactcatgctccctgcagtaaataaataaacaatataataaaaactaaaaagttccttttgaaaagacaagaagacaaagaagactactttattagcgaggtggtttgaaagaaagtgccccccctcccaggagtggcactattaggtgtgagtttgttatagtgggtgtggccttgttggaggaagtgtgttttgtgggcatgggctctgaggtctcctttgctcaagctacactacgtttttctttatgagaggtgctgtgatgatggtctctcttcacagcaatagaaatcataagtaagacgatcaatttgcctgaaagctctggactgctaaggccagatgctggcacctgctctgaaggataactctcagaggactaccctttgttctttttcagaacataatagtcttcaggataaaataattggagatgcctctcttttgtgttgctacctctttccagaattttcattatttaaaggtcttaaattatggtagatctatgtggaagctaaggacattttctactgcttgtaggggatgacagactgccccatgtagttaaagacaagagttagaaagtaaatgtaaaccaggtcagcctggattctgcacaaagggaacatcaaccagtttctgtcttattacttcttttgtggctaacttcttttcctagtccctaactcagctgctagagatgatactgacttcttacaacatggcacaacaacagccattagagtttggcaggatgccttgagtcctgcatctgtgaatgaagggagttagagtattggttttccccagagggtggcacattcacaggtcagggagtccatgatgattttagggtatgaaaacacagcattaaatagcattgagtcagtggtaagaaaatgacattttcaagactcattcaatccttcctgacttatcccccactaaccccatttccagtaaagttgaggcaggcttcagcatctgccaagaatttcataacagcatggtgttttccttttgtttcttttatggtcatcttctatttacatcaaatcatagtcattttcaacttatggccatgttataattttttaaagtaaattgagttttaaaaagtgaaaaattataaggaacaggccagattacaaaacagaatatggctgattaaatgttgagaaatactaaattagatgatgttcaagcttcatgtattcctaacattgtattgctccatgattccaagaaaagtcatgaagtccttaagtctgtaccacttgggtatcagtgacacattctttaactctttagggccttcctggtatgtagtcactggcgaatagcataatctattccaatttaatggcttagaaagcatgatgtcccaaacctaggtatattgtgggtgtgttgaggggtgttctgggggtggggaaaagggaagagaatccaattctttctaacatcttagtgctatgttctcgatactctacatataaactgtcatttatttgctatttctggaaggagcttcaatattccagccttggtagttcattgttttgttttaggaatttctatcaggatagttgtatcctagtctccctagggaaggctgaatatatacagaaggctgttgtttaagtcactgagttagagtcatggtatagtggattgattgcttcaacagccctaatttcccccctttccttgtatccattgccaagtgaccatggagttctcaatgcatgcgtgaaatctgcttccttggtttgattctagatttggccatgttggtgaaggggatatttctcaatgcaccccattaaacttcaagaaagccctagtgtgtcttctgtttccacttttctaccacaactatcaccatggcagacatgcttatactagctggtctgaggggagacacacatatatggagcctctgctcttacatgcttttgttgtctgagtccatattgttgtggatcagctgatcattgatcccctggcagctggggcaagaataaccatttagtcagcgcacaggcttgtgaactccgtaagtgttgtgggttaaagccatggagtgtaggatggtttgtcccctgacacaattgagtctacagatactttcccctactcattgtgggaagtcctttgtttacttttttctctctgatgaaaagagattgaattctctctcccctcccccaacccaaaacatctccaatatacctacaacatacctagatttgggatatcttgctttctaagtcattagatttgaatagtgaatggatttctgaaaagctcaaagctacaacagtctgaacagctcaaaactaaagctgtgcaaataagccaagatggccctaaagagttaaagactgtgtcactggtacccgggtggggcagggttaagaaccttccatctctaattcaggttataactgattggaacacatcccattgctgcccagtgaccagtggctagtcagacttgaccttcataagttaatttgcagggcagagattctagctagacagtggcagatacttaattgaaaagacaggtagaactaggccatattggtcccataagagtgaagcaagatatctaaaaggaggaaggaggagggaagggatgaaaaagagagagccagggaggatgaaacatatgacatggacagaggctggagagtagagagaaaagtagatggtggaggtcacatgttcagatgccgactctctcaaaccacttccagtttcattatcaacctgctttaggctgcatttcctgtcttcaaatgcctctgtggtgtcctctattgggctcatagtcaatcgtcctttaacttaggttgagtggttttgttttcttgcaaccagtgttttttgttttttttttttttttccgtgtgtgtgtgtgtgtgtgtgtgtgtgtgtgtgtgtgtgtgtgtgtgtgccattagtgtcttagagagaaatagcttccgactagtagtttgtggagcaggaacattgtcagggcatttcccctctggatagtggggacagcaatgagatgggagaaggggtcttcagaggttggaaagatgtaaataaatattggttaagtcgcagttctactgagggctcaccttcgaatcacacacacacacacacacacacacacacacacacacacacacacacacgctttgatatgaacctaaacaaaatagaatcagatgagcagcttcttcttcaaaccaaaacaaccataaaaacacagagaccaagtataaaggttaatattaattgtaaacttgattggattgagacatgcctataaaattagtaaagctacatttggggatatctcttgagagtacacttagaatgtggaaattctgacttaatgactgtatgaatccctgatggttcatgatatgatggtagtgagagtgtgcctggaaggtcagaggtaaggactcgggtgatagaataggtcactggagatgaatcttttgggactatagcctgctctggccccttgcagcattcctcctctggttcccacccttcacgaggtgaagcagcttctttaccacatattcttgcagccatgatgctctctgcctaatgaccattcggttgaactctctcaacctgcagaaaaataacctcttcttccattagatgtttctgtcaggtattgttttcccccacagtcacacaagagtaatgagtgtaagtaaaaatccatggtttgcttctctggcctgtgtgttgctgtcacctctatggcaaccttttgaatttctgatcatcctgtgtccatttccaagtactagggttacaggtgtgcattacaacacacatttatattccattgttttttttttttttttttttttttttttttaatttgagacacggacttcctatgtagttctggctggcctggaccatgctatgtagactaggctgacctcaaaatcctcaagttatcacttgactttagtgttctgaggacaggagatggtatctctcctattataggtgcaagagaggagattccattctaaatgccttggccttggaaaacttcccctgagagaccacaccagctcagcttccatgccacacataggggagcatgtgtgttgcttttttttttttaaattgggattgcacactttttcagaaaccatacatttccagtgagtctgtgtctgtcaagatgtctgcagaaggatgagctggaactttcttcaagagggactgtcctatataataaagaaattagtaatagaacattggggctgcttgtgcctggagggatgagcgcagtgagccagacggcacatctttgcctggatgcaccttaggggacacacagctgtaacagcaccacagaaatgatccatggctcccactgactctgatcaggctgtgcttgaggggaatcacattcatggaagtaatctatatggcccctaacgtgcagttcacgtacataggcaaacttgagttcctgctgacattatttacacattccctggtaagtgacaatgcaggaaagccatccatcctcatggctcctacctagttcttatcttctggcatagttctctctccatgccccttgctccctttctgtaccccagatgccaagctcagtctcctgtctcctcacccctgtttcttctcatgacgagagctgttccctctccaattgatgatacttcagctgtacagagtccacatagtatgcagtccatgttctgctttgaacctgaacagctgttggcaggctctgatgccagtgcccagcgtttgctgtggtgttgggaataggcattcagtataggctgagtatcaacaccactattgtcagaataaaagaagtgacagggaacctttacacactggactaattaaaggagtgaataactgatacaaaatccataaggtttggataatttttaataaacttttaatagataaatgcccaccagaacatgccaaagcagcaaggcgagagagagctcccatgtgccttgtctgtcccttaaatcctctcccacatggtcgggcacacgtgtagccagtccttaggagtcgtggttacagtgtctccctacaactaatatgtcactaaaataagcatctcaatcttcataggtctattaaaataataagcaaaaaaatgtccattaagtggagttgtggagaaaaaaggaagtagagggaaggccttttgctatttatcccagcttacctattcacaacaatcaccccatcctactctctgttttgatagctatctgccactggtctagctcattaaatcatttcttgaagttactacacacaaagtgctttcttgggcagattcaggtggaaccctcaatctgtcattgtcagctgtgtatgtttgggtccactcatgggtcagagcttcagtttctccatctttaagcctgagataatgataccagcaatgccattattaatgatgttgatacatgcctagcttccttggtcattcatctaacaggtatttatagagcacctgtaggaggcaggctggagaaagaccagtggataaagctctaaagacttctgttgtttgatcatcagcacggtgtgtgtgtgtgtgtgtgtgtgtgtgtgtgtgtgtgtgtgtgtgtgtgtgtgtgtgtgtgtggagaggatatgaaaaagaaacaagagcgtaatgaatgaccaaactgagtagtgttgtagggaggtgattggcactggagcaggaaggtgccagagtgtgtccaggtggccaagagaccacactgggagagcatgatgggaacagactggtctcagatggggttgttggccaagagaggctaaggaaaggctggtccacgcagcaggtattgccaagcaaaggctctgaggtggaagcctgcctgctgtgtgctgtgagctcaggaaggtccctgtgcccgaggccacgctgggagagcagctggagaagaggggagggtgagggcagagagcatcacatggggactctggagagacctcagagaaacaggttctgaggtgacaggcatggagacaaagcattccgtatcgtaatcctggatttaattccagtaactgactaattttcctttctccactcatacttctgcctgatggttttgcagccctaggtaagccatcttttcaggatttttatttttttcttttctggttgtttgctatgcccttaaacgaaatagggggcacctctgcgctcagcagggagcaccgatggctgtcatgttttgataccctataatctgcaaatatcactcataaagagaaaggctaatgacaggtggcgggcagctgggcatgtggcacatgcctgtgaccccagcacttggtagatgggtttcaagttcaagggcagtcttgggaagacattgagtttgaaggcagcctgggtcacgaagccagacactgtctcaaaacaaaactaaaatctcaaacagaggataggagcagggcttgccagctgtctctcagtcccgcccccacagttcaccccagcttttggccaaacagcagtccactgaaggaatgctgatttctaatcagatataagcagaagtaacttttacagatagatgaataccctcacagcatgagagagaatagtgttctcatggatggcatcagggcccaggcccagctcttctctctgtagctatactccaccgtggtgctgttcagcacacattgttcagtgaacctgctgtgcctaagaacaataagcccaggtataggcaaactccttaagtgccttaacctttgctgaagcaggaagaccgcggtgaagctggagccagcagggggaatgaaaactctctagatgttttgactcatcatgggacatacaaggttcctatttgacttcttcatgaagataggaatagttgaatatcaaagataaaaagtgggagagatggtttacaggactgatatgttaatagatccaaccctgttgattacattcgctaagaacactggaaaacgagatagcttccctctgccattgtaaaaacagcccagcttacacagccgtggcatgtgagagctgatctgtgtttgttctttacaaccctggctgacacagttttaacaagctaatgcttcgtgcagctccccttcctctgatcaacagtggatgaacagtgttccctttggccaagttggtctgaacagagctgtgggaaaagtcctaaaacggaattgccaagcagtgtaacaattggcctgtttctaggttctgcatagaaaggaaacaagctggcctttttgggctgctgtcccttgcctcttcccaagacaaaggctgtttgctgtgttctcatagaacgggactgggggagtggagacttgtaccactgtttagaaaaagagggtggccaatgcccaggttctgtgctgtattctcagcgatagtccaaacacatgtaacacaagcaaatgctgtgaccactggagagagaaaaacacaagggagggggagctgaaagaagtcaagttcactgacaggaggtagagggaacccgtgcatgcatgattgcagttagaactgcatgtaatgatacaattccttgtaaggtgacataaaaccaacgtccagggaagtgagcatgtaaactgtctgggctatggtgggctgtcctaatttgcacaggtatgaggccgatgcaagagttgttctccataactcttcaaggagcagagttgatacaggtctgacaaaacgtgtttcaaattcacagacagaaaggccctctgaagatctagcaggcatttgtatttacagccatcctgcagaagggcccagcaggttctaggacaggcgctttcccatctgtcccctcatttgatcctcacagcaactgacacagttctataaaggtatcaaggtcagataaggaagataaagtgaactaaatctagcagggaaatttttggaaattcttacccatttacttaattaaaagaaaagttaggcttcccaataccaagcacttgttctgtcccaggaattgttatgcatattttataaatttcaactaaaaaatgaaagaaggctaggcagtagtggtgcatgcctttaattccagcactagggaggcagaggcaggtgaatctctgtgagttcaaggccagtctggcctacagaggtagtacagctagggttgctacacagagaaacactgttatgaaaaataaaaaaaaaatgagagaaaacacatgaggtacacacttttattatgcctattgtagagatgaataaattgaggcaaaatagctaactaacttgtgcaatggtacacagctaaaaggcctgaatccagacctgtttctatcatctttaaaacaaaacaaaaaccaaccaaccaaacaaacaccactaccataaaagagccttagtctgtatcccaggctggtcatgaacgtgagatcctcttgcctcagcctccttactgctgagattatagacatgtgtcatcattttaacattttaacaggtcctatcattttaacattttagctaccataccatgctacttctaatactgaggggttgtttttcccttaaatatggggttttactatgtagccctggctaacttgaaactcattatgtagaccaggctagccttgaactcacaaaaatctacctgtgtctctgtctcccaattaaagatatgcaccacaatgcctggccattgtgaggatcttgagggtcattttaagggagggtggactgatgggctaatgtctgcattctagcttttcttatgtcgaaccagtaactatcaaatagtgatgtttacaaatgatcaggttttctttttttcttttgtaaatttttagggtaagtccaaccataagaatttttggctaccatgcttactttcaaactatatccatgtagtctatacatttgacaaacgaaacgtggctcccaagttatctaatgaaagaactcaaaatgccaagttttcattttcctttttggttcagcaaaaggaaattccttgagcaaaaggaatttcttgagaaggagagctgactgacagatacatactatacaagtgcagattttaaagtgtttatattgtattagataaggccacctagtccacagacttgaagactctaagtaagacgtctttagctgtttatcctgagatctgtttcctgagagctgtttttcctgagatccatgggaacagagacatctttagttcactggatggtgcagatgggtgcaagggtagccattctgcctgagcatagccttttggagacaccttgactgacagcttcactcagcaggttggctttgcagtagagactcagttgagaagaggctaaggaccagctacaacaaggcttatataagcaatgaacaaagagcaaatctttttttgctatctgtcatgaagaatagtctattatttcatgttagtaggtgattgaagggactggctccatcgatggttgtcatggatatgcactgctccaactgcttccagattataatagaaccagagatgctgagtttaggaatgttaaacaaagggatctgatgttataaaacagtggaattctatgtatcagcatctgtgactaatcaagatgctcacaatcacatctgtagcttcagaattcaagggatagaattgctggagcaaaatgcctctaccgatggcaggtatgtaagatcaaatgcacagcatagtgccaataagattttcattgctgtgctctctcatttaattaatttatatatagaccatatataaaattatacacacatgcaaagccatccttgtttacatctgccttctcctgcctccatgaactgactcagaatactgacctctgagcagggtacgtggaacataatctgttctattttgagatttaaagagccacactgcagaatctttctgctcttgtgtgcatttggtggtctgaactacttttggctcaaaattggagctactttggattctaggactctgtatagatcttcctgttatgcagtctgtagctaggctaatttcagatgtgtgcatgtcaaaataatgaagacacacttaaaaaattctataacccagcattttggctcacttagatttacctgacagaattaataagttagttttaggtcacattattaaatgataatttaaaatgtacattctctggagagcaacatttagctacttttccttttgtggtgaacatcctggtgtaaatcaaatcaattggatattagattatagcatgacccctacgggaagcagagtcaaccatagaatatctactggctgatcagaaaaccattcaagaacagggaaaagacagaacatttcaaatgccatactcacttcccactatctccaggatgagagcatcggtgtagtttttgtattgaacaatcattcaattgttcacagtctctcttttttttattccattttctttcaccctccatgcatttccttgctcccctttgatcatattatgagataaactttcccattccaccagagtattatcagccactttgagctggtgagcaaatatgtcttccttctataatccccacagattgaaagtgtggtaggaaaaaaatctctcatctccagactgtccattcacagggaaacttctctctgtttgaatcctgccatacctctaaacacacaagagacagagaatataagatccaggtgtgggaccactcggcatgcctccaaaccccagcactgccattcacaaagctgtcctatggcaggacacgtaagctccctgggactgtttcttcagctatcagtgggccataaccagagctgtgtgtaaagatttacctagagtgtctagcacagggtgagtactcaataaacactagccttttctatgagaggctctagaacttagagacattagcctagacatcaacccagcttggtccttcaaatagtggtgtatcttacttaaattattaattaggccaatatgaaccttttggaattttctgacaccgaccactattgaacaacaaaattggccatttccccatttcctcggggtcaaaaaaatacagaaatattctctgtgcatcagcttcttaacccgttaaaaataggttcaataatactatgtcataggctcctcatgggtattaaatgggttagcatctataagtgtgtggggacagtgcttgcttggtatatagagagtgctattgtggctggtgagatggcttagtgggtaaagggacttgctgctgcacctgatgatctgagctccagtcttggcatccacatggtagatttagagaatcaactcacgaaagtttctttcaacttccacatgtgggtgtgcacacacatacatacacacaccctttaatcatatgtagtatgttgatgggaattgatctagggcctcctgtatgctaggcaagcacttcatcactgagtgatatatatatgtattttcttagctctggaaagtgatattgtaatagcatttgctgttgttatttttgttaaccttagatataattattgctcaactcacatttttttaaaatcaagaattgcctctataagagcaacaagtgctcttaattactaatccatctctccagccgtgtggttatggttttttgagccaggatctcatctagttgagattggcttcaaactcactttgtagctaagggtgactttgaactcctgatgttcttcatccatctcctgagtgctggtattgcaggtttgtgccaccatgcctggcttcatgctaatgacatttatttatttattgggcacaggctaggcaagtactccacccttgagatgcattcctggcccttcaccagtgatgcgatctttagtaacattgcatcatttaacaaaatataattttcatagcagactcctcctcacatgctatgttaacaagaacctacctggagattgtaagtaactagatctctaaaatagcatcattctgggcactgaacaaacttatttagttgttcttaaccttgcctgacctgacatctctttttcataactagtttctaaggtctcctttactctgctatggtatagtttacctgtatacataaccatgggaaaatcaatataatgaacaaaaggaagaaaggaacaaacatttgaacttataaatgctcaggcataaatattctagaagctactgtgaggaagttgttttgggtatagagaggatttccaggtatgggacagacacaaccgtagatggatgtaagctccaaatacagtgagtgccttgtcatgagaaagttgattttctatgatggcaaaccaccctagagaaagttccacagaaaacaaaatgccacctccctttgattttcacagtgatttcatgactggaaaaatacatggcttattaagaacatgcaaaatattgcattaatgtatttaaatgtaaggtggaattaggtacagataattataaccaggtttttcatctacatggttattttctgggatactaaaaatctgtagacagagaacaaggcttgattgttagatcttacccctttaagaacgggcaaggaaaaaacacaccaagatctcttagacaaaatttcaaaaatacagaggtgatgttgcctcggtcaaggtcaccaagagcaaagtcgagtagccacttcattttatagggaggtactaggctaggttcatttggcctgctctttaggacaaagctgaactagaagtcaagtttcctagctactaatgtaaaggattgttggatcatcaaacatactgggaaccttgggatcagtgctatagtggagcactgatatcatacaaatcataacacacacacacacacacacacacacacacacacacacacacacacacacacacacgcttacatatacacaggtactcaagccaccatcattatcaccattctcaatgttcataacagctccattcttacacaggaccatgcctaggttttacagaggcatgagttcaaatctttataccacctaaaaggtccaggcaagctggcccttatctgcctctacttttacttggtatcatttcctccttacccatcatgctcccaccttgttggtctgtgatcgagttcccagcaggactcactctctttcctgcctcaggaactttgcatgaataactttacctccctaggttcttctgacagacttctgtgcattttgcatagctcagcttagaaaaagccacttctgcagagtttttcctggcggaaaagcattccatcttttaaaatcactgacttatagggttcaagcttatgtacattttttcatcttacatatatggatgttttgctgggatgaatatctgtgcaccacatgtgtgtgcttgatactcacagtgaccagaaggggctgtcaaatctcctttaatagttacagacagttgtgaaccacgatgtgggtgctgggaatcgaacccgggacttctggaagagcagctagtgtttgtaaccactgagccatctctccaacccaagcttatgtttttatgtacatgtttctaagtttattatctgatacctccaataggctgtgagtcagtgagaggaggagacagcagcagcttaatcagcttcaagcattacaagcacacagcacagacccaagaagggatgagtaattgggtcagctgcccagtatgaccttcagtctggctggaaagcagacacatggcagaaacaatcaggatgtcttttgtgatgagagcaccgtaacgcataggttctaacttgtcttccacagagaagcatgctatttgaaccagcttgttttggcttacttgtattcaactaaagacacatggagtaggaacacctcactgtttggatgatttgaggttctcccatctgtccagagccggcatccctgctggaagaaacggggagaaacagcagctttgcgaagtttggctacccaggactcaaccctacaagtacccccttcatcctttcaaggttatcaccagtgtctcatctctgcatagcttggttttatgtcttttgttttgttcttttctcaaacttttgcccttgggtatcactttcattaatctggcacacctgcatactaccagcactgatactattgtttttctgtaaatgcaacacactttgacatcaatacagattttggtttaataaaaaagtggcaatgtgcatgaactcctcggtttatgagctcatcatattcactctgcagggcatgctctcacagaagcattgctgtgagggagacccaaggcagatctaaacacagtttcaataacatgttgaaggtcacacctggttctgtcatggactatccctgtcacactagagcaaactgtttatagcctgattctccacccaccctgtgcccaccacgaatatgaactgctcaggattagagttagggataggggaatcagggttagggttagtgtaaggctttcctaagtgtgttgcatgcagtgtagttttgcctgaatctcagggcacactttttagttgcctgttcctaacagcacttatctgccccaccacctctgcttcccccaggggctgtttcctttgcaaatactacattcttgttggcattaccaggctattcaccattttaatggtggatgctattgtatatcctcgctgagactctgctaggaagacataatatgttttcccacgctagtgtggctaactcatccatgatgagggcttctgaatgcatctacagagtagctattctaagcttggggttggtggtgcacacctttaatcccatcacttgggcaagcagatctctgtgagttagaggccagcctggtctacagagtgagtaccagcaggataggctccaaagctacacagagaaaccctgtcttgaaaaatcaaaaacaaaacaaaacaacccccccaaaacaaaaaagtatagctattctagaactatagccaatttccaggaggccaaatgatgacgcttcattggacttcatgaatgtggaggccactggcttctgggagattctccatcctctttgacagctgacattgtgacactgcactttcagaatggccaaaggctgttgtgattcttacatctccagtgttgagcaggatacttagtaagtgattactaagcaaatgaatgggtgattaggactcaggactcagggcaaagagaagagatctggagccttctgatgttgtgtagaaagtaacacagacttggtcattgggcgtgggttccaattcacttctcctgtaagcctgggcaagttcttcactcttcccaatatccgtcagcagactcggactaggaagtgtgtcattagcctgtcctggtgccagctactgcattagagactccacgagtgctaattgactttccctttccttggccatgcagaagctgcccatggagcctgtgaccctgcctttgtcacacacttaatagagaacatgggaattttgatattctgtacaatctgcttaaatagaactgctgtctgtttggctgaaggcagtgacatttttgaaacttgatagggtttgtaatcttaaatctacagaaaagaatccagtcttttagtgctttctctgcttggaagaggcgtcccctgccctgtatattcaattactgactgcataatagaaccacatgcatcatatattgttctttctgtaggtgaatattatgtccctcaggtggcacaagtgactttgaagtacttgtcagcaactggccttcctatgcagtactgtaaccactcagttcacagtggcattttacttctgaagtcagttgttcggaatattaaaaagggcacccggcggtctcacgtctttgcttcaagaactgtgcttttgtgaagctgagccccatgttctaccctggcaagtcaccggcccctgtttaagaactgttttgaatttggtttgctgacattgattagtaactgtaactactgagtcccatcaaggtggtatgattctcctctatgtttcatcccaagtgaaacaccatgttgatagaactgggtaattctgttaggacttctgaggtcattctaccacctcatctaccagaacaacatggtgatttcccacaccctgtgaaaactgactgaggtctctcacaaagtctggaagagaaacattgaggttaacttcatctggctcaaccaaatacttgtggatgctgacaggcaggttagggttcccaggttcttctcattcttatatagcaatgacatctgggttaattttatccaaaggcttctggagatcaagagacaaggtctactgcagtttactaagagcagttcatcctttggctatctagatgccatctctgtgtgatatcctaactcagatgagcagagagaaagatgttccaaaatgctgcaaggaaatagagacctagagctttccaggccaagcttcagtttcttagtatttagggacttttaaaaatttttcatttagggctttccagacaatgaggcaattgcattgtggcctttccttgtaagaagcaatgattgggacttgaattttggttgttaggaggccagattttctcaacctcagtgctggttaacatggaggaaggggtgattctgtatgcgacactggagggtgatggtcagcatccctgacctctgcttctagatcaagtactaccctctgagttacgacaccccaaaatattcctagagtgtaaactggtgcaggtactatggaagtcagaggttcctcaaaaactgagaaataaaactctccttagatcaggtacactactccagtgcctatacccaaaggatgctacattgcacttccatgacacttgctcatccgtgttcataactgctctattcacgacggctaggaaaaggcataagcttagatgtcaatcagccgatagataatgaaaatgtagtacatacacaatggaattttattctgctataaagaaaaaatgaaatcatgaaatttacaggtaaatgggtaaaactagaaaagaattatactagatgaagtaaccccggctcagaaagaaaaatgccacatagcttttctcagatgtggatcccaacgtcaaatcttagatttatgattaacttggagtacctgcagaagtaaaagcaccagaaaagggcgactggggcagctgctaccttaagggaggggagatatatagcataagcaatatgaaaacagagaggggagattcggggagtggaaagtttaagcaggatagatgtaggggtgcgtagggagggagagttaactaaaactaagggtttatgaaaaagccgtttggagatttacttccttgggagccagttaaaaatagaagttttttttttttttttttttttttttaaaaaaaaagagggctagaaaggagacattctgcatgcctgagaaatgctgttcctagaagccgtgggtcactaaacaaaagccctagtggcatgtgtgagatgcctccttatgggttgttggtcagggaggcgacagaggccctcagtacagcatgagctctgatcactcttctttttttgcccaccagaaaaatggttgataaggctccattgctgaagaaaccacacactttggatgcaaggtatagagaaaccaaccttgaactgagctggaggcttcctcgatgctgactagtattaacagtgccaaagtcttctggtaaagaaaaagcatcaacgggtttacccagctgtgagccttattgtctacaaataccaacctgccaccgcaaactgggtccaacggtgcttagtgacacaactgttgtggggctaaccaacccttctgattggattttaggtccattccacaagaaagagttcatgcttagtactgtgtgagcctagccttgaatggctgagccatctctccagtccgagtactataaaccctgctaaaaagccatggctaaggaggtattaggccccagatgtgaacttaatgttgttttgttaaatcatcatagcaccacactgctttttaaatatttatgtttatacccatagacaaatgcatctccagagccaaatggctgctcaaggtactgaggacaagtgatagttgtgtgttcaaccctaaataggacatttataccaccacctttaagggtcagggagcagcatggaaaagagaggcaggaaaaaaatgagaattggaacatagggagagaacttataaaatacagtcatgcaaccagtgcaatcatgacctcatgacagctgaggctgtctgtaacgggcctacacaagactgggcccattaacattctatcatgaatgtggctgggcttacagggccatatagcttgatgctcaactactgactacaactgatgaacactgtctttagttgtataatcaccaaacagcctaccaggcttttagtggatagttccaaactcacagccatacagacaatcctgattaaatcctgttagtgggtggcaacaacaacaaagccattaatttgcaaaggggacttgtcaggaagaacagaggaaaacaatagaagtaggggaagagataggggttataatcagatttcacactataaattatggaattgttaaagaacaactcagtgaggtttaagaaataaaataaacacataatttctaagtcagatagccccttgctgggtgagagtgagtggccacattatccctggctgaggatcagggaaatagacttgaacttttgggaggctatcatcatcattatcatcatcatcatcattatttatttggcagtgttagggactgaactcacagccttgaacatactagagagtgttctatcaccccagatcctgggagatttttctgtggccacaagaaagcctctttgggtatatctcagcctcttgggggcagtcctgagatgtttttgacctctgagtttcctgtatagtttgcctgaagtatttgtagttggtataggcctaataataaaataataataataataataataataataataatagcaaaaggtcaggagggaggggagagggagggtgagaaaagaaaggggaaagagagagagagtgagagagagagaaggagggagggagggagggaaagagggagggagggaggggggagggagagagggagggaaggagggaagggctatgcatgcatccgttctctgtcctcccctctccctgtatacttctatagggccaaaagagagaaggtggaatgtggaaggagcatacaggcagaactggtgatgctggtctgtggaggaacttacggctagagctttggagtgtcaagtaatcctgatacttaaaaccaatattaacagcgtactataggcagcaaaaagatggcttttggagaaagtgaaatatctgccaaggtgcttgggaaaattgccatgcaggcacagtcctttcaccaccaccatgcctcggccctgctccctgccctgcacagttgcctcatgctgccctctggctgctcaaagcctacttcatccaggctgaaccatctgctccaacatttcctgtctcacttccagccctccttccccgagtgctgattccagctatttggagagctaagattaaacacacaaatactttacactaaggagagatgagtctgcaggtttgacctggtcaggggattttggatcttcgaagggaagcttgctattcctcagtcaggcgagttttggaacaaagagcatctgtctgccttctccagcttccctgaagtgagcatgggtagtgcattttctagtcatgatctctccattcctctctcacttggcttttgtaagttagagatctcacttagaaagaggctccacacaagatgaactgtaaaaagacccacatttcttagcttggcatataaagtgtttcttagcaatctgtcttcctaacctcatttccattcattccctcacgtgctagtagaaaagatggacacagcctttggccccagttcctcccctaaaaacacagatagtgcagcaagtggccatataaggaaccagacaaaaacaacacgtcaaaccacggtaggtccaggaggcctgggaatgtcttgtatgtggaactaacctggggattagtcactggctggcagagttgggggacctcctgtctttgctcttcccagccccatctgctaacacctggcatgctttgtcatctgtctctgactttggacatgacagtcctctctttaggatggtttatctgtctgaaaaactccttgtaccaatccagcttaactcttctcaccaggcaaatgtctcggacccctcattgctctgcctctctgctttgctgtggctccctgggctactgctaaactgtattcctctttctcttgagtgagtccttataagtcacctctatggaactaaatcacaacaatttgtaacattctgctgctatgccaatcttccctattaactgttcttcaaaggcaaagaaatgaggtcctttttaaatcccagctctggcacagagcctgacatgtggaagtgtttggtatcactgaatggacccattcaaactgagaatagcaggctgttccatgcattcttttctgtactagatggtgagatttaatgcccacatagaaggatccatagggcatgtatgtccagtgtcactactgcccagatcaagaaatagttttctaccagaactgaggatgccactaagacaaagactcaaaattctatatttgactgaaaactactggtgtcttctaaacacaactcatcttgaactaggggccagatattctggagaccaaagacttgtcccaaagccaagcaagttttagttaaacatcccttggctgatgtggcctacaatctagctgcaggaagctatttgctctaggggacattatcttcccaaatctctggcaccttcctgccttacacgctgccttcaggcttttgtggactctgtcacattctaggacaattgatgtaggtgcttgctggaatggtctgctaattgttaacctgcatgcagatcagtctgtttgttggctgttaatatggatccgttaaaaatcaaaatgggtgtccttggctccgcttttggtggagatcaaccatctgccttactgggtttggtcagaacaccgtgtgtttggaattctgttaccgtgtggttacagaatgtacagcaattacctccagcatggcacagctcagagcagggggactctgcagggtccattctgtcttgctgctaggttagcacagctctctcttcctttctcagtactctcacaatgaaggacctccttccctccctccctccctccctccctccctccctccctccctccctccccccctccctctccctctctctctttctctctctctttcacctctttatggatgtccagcaactaatctctgtgtatattttataatgatggctttgccctgttatatttcttgaacctggctgtaattttctaaagaacacacttggctaagttttaggttgttatcaactcttggattccctcgcaggatatatatttccccttgactcttcaccccatgcatgaatgtgttataagtccatgatcacgcctttcaatttaaccccagtgtgcagttcctttataaccactcagttcctttccattgtcctgactctcatcccaggcaccctgatttctctggctccgtgtgtctgttcacagaaatctgcttgtttgtttgattatttaaggtcatcaacaacactgctttgctctgtgttttgctttaggatgtttaaccctgcacgggagactttctgagttgctactttgtgccagacacagcttgagccgctgaagctacaacagggaacagatagatgtggtttttgctcccatggagttggcataccaaaggaagctttttgttctagggctgcgctgtccgatatggcacccactcgagatatacagctgcttgagttcaaatcccaattaattaaaatgagataaaataggaattttagtccttcattcacactggccacatttcaagtacccagaagcatgggagaccagcagctgtggcaacagacagcacagttctaccacagaccattcactgcccaggagtgttctagaagaattttctagagccactgtcatcccttgactctataaaacccttgtagccatagagagaaatgatttagaatgatatggctacagattgtaattcttctgttgtaatttcccttagaagcaaagtttatgcacagtattcaggaacctgtacacttacttttaattacaagacagctaaattaatgcggtgggataagagttggctcactgtctctgaagttctgcattaaccagaaatggaagtaaaatactggcaaaaaaaaaaaacaaaaacaaccaaacgtatcattccctaaatcagagaggataagcatgttcttagcacttatactggattgggtatttgcagtttggagatgacttaaaagtctacaggaggatgtgctaagttatttcatataaaggacaggaacatcagttgatttgggtagccacaggatgaggtgcagtcctgaagccaatcccctgtggatactggggatgacaagtccatcactttcccatcatgtctttggaacgcgtgttggctttgttctcagtatttcatggataggagagttatcaccgagcacccagagagagcctgtgtatctttctggctattctcttacaaattcccagggatgtgagaatgtgtgtagaagggaaaacagaaaggaagattcggggagtggattcaaatgtcccggctgaagcagggacagaagagagagaaataggaacctgcacacatgtgcatgaggataagagggaatgccggtccacctttgctttgtgaggtccggctgtatcatccttggagttctgttacaagtagcagggtttctgggagagaaagtttttagaaactgggactgtagagaaacattctaactttgcaggactggaagaatcacactgacattaagcaggaagctatatgaactggcaagttagccccgcatcctgctcccacccatcctaacccatattccacaaccccaggcagtgatctcctcccaattttaagagtataatttcaaaatagaaataagtggaattagaaggcaaataccagcttcctggcagcatctgtatttgtggtctggaagcaagatccacccagaagtagtatggtttctttctacacacatgaaccgaggtaacaactgatacccccttctctgctgggtcattttatctgaagcattagaatgacatattcctagggagtaagcacatctaatgccttcggagaaaacttggggagtgaggaaactccagattccattctggagttcaactgacacctgcaggaaggaaaccaatatacttacatggcttgttggcttagttaggagtataatcagtctgcatggctgatctggcctgccttctgttcttataaataaagttttattgatacatagtcatacacactagtttatatctaggaccacttcgggggtacaatggcaacattgcaaactatgacagagaccatactgccctgaaacaacatctagtcatttctggaaaatttttgctcacacctgcctggcctggtttacaaattccttaaagacagggctatgcctgaatattttcctatttcctcacaggccttgtgggtacaaagcaaggatttaagaaggcagaataaaagatcccaagacttgagtgactctttccgcttcaggcacgacgtcttgaagagactcctggaaacatcatgccttcctttacagctactgacctcaactattgaagagggtacagtcatgtttctctcagaccccatgttacggttcttcttttctttttctcactccttccccagcatccccggcttctgggatttcaggtctgtgccaccatacacagctctataatgctggaacttgtgtgtgatttgaccttccaaagtactggaggcttggtaatgatgtatggtggtgttgagatagggaaacctttgagagctggggcccacttgcaggtaattaggttctggagacatccgcaaaagggattaatggcagtcatgcagaatgggttcactctctcaagagtggagttttataaaacaggggaagcctggctctccactagtctcttgtttcttgtgttgcgatgtgatttctttctcacacgttcccaccattatgacaacatccatcatgaagcccttaccagagcccagaagatgccagtgtcaagctgctctgtttgtgaagctgcagagctgagcaaagaagccttccctccctctctcttccctttttcttttatgtctctttcagagggatttttatcaaacttgtgagtctccagttttaaccttcaagtgctgggataataggtgtgcattagcatgcctagataaatctcttttattgtgaagtccctagccttggggattttgttataccaatacaaagctaagaagtgtgtaatgggagagatgattgtcacattgtaaatgtgggtggttggatcggccatctgctgtgtacataatccaggatgctcatggtttcctaccttgctggaaaggagtctccaatgtgaatgatgtcgggttttagctgaggagacttagaatctgagggcctatctcagtctagtttcttccagaagcatcactgaggaaagcattaaaacgagcgtgatttatttactaaagaaaatatgtacagtgggagcagaacaagggggaggggataaaagccctccccgccaaaagtgcagcttcagctgaagcctgagcccacgcctgataccactaggatttccagggtatgggttgtacctgtattcttcagcttaaaggtaggagtttgggggtttcaacaagagtcaaaataactaagcttttatattccccgcatctaaagggtagaaacaaggtgcaggattccctcggacacccaaactctcagctcaccttaggttctctgggtaatgaagagactgcaaggatcctgaggcatttatctgaatgtggcaggtgaacccagtattagagaccacagaaacagtggggggttgtgtgcaaaacctggaaaaggggatgagagggaatctgggcagtgaaccaatggtatccactacactgcctactggatgcccatgtttattaatgtgctatgaggttatacatcatttccgttgtgtgtgtgtgtgcatatgtgcatgcatgtgttttgagacaggttctcactgtgtagcctaggctggcctcaaattctaagtcaccctgcctcctgagtgcaaggattacaggcttgcgccaccatgcctggcttattcttgccatttctgtgatgtgcacactccattttatggaagaaccaccttccatttcctcaccttattgtttttccttcaaaaataaaatgatttatctgggattataaacatgtaggctttttgttgttgtcagaggattttgctctattcgcaatacctaggaaatggaaacaacctacatgtccttcaactgatgaacagataatgaaaatggggtccatttacacaatggaacttcattcagctatacagaaaaatgaaatcttgaaatttgcaggtaaacagatggagctggaaaatattattctgagtgaggaagcccagaccttgaaagacaaacgctgcatgttctctcttattagtttctagctctgaatctttagatgtaattgcataagccaggaaaataaagggaccacggagggttctggggagaagaggagctttagagatggagggggctagtaggacacaggtgctatgaagggggagatgggaaaaacctggtggagtttaactgggaaatgaggagggaagacaatatagacatggagggaggagggaaaatgaaaaaaaaatcaaaagcctgtcagaataggtgttttttggggggggcggtcacatctttagggaagcataaatgttacatattctctgtcgaaggacattccctttgtttgttcttagtctagttctttcatacttcagaggatacttggtcaagcactctcagatttggggtcccaggttatgtatggtatgcctagagattcacctgggaaacccagggactcttggcatcttctcttctatctctccagtgtgaagagtttaaatcctactctgtccccacactgttgcttttctccactctcagttaggggctgctcttcatgggcttagcccacttatgctttctttgaagatgattagctatcactgactttgatgtcccaggcactaagtcaacagcttggggttagatacagacaggccttgtatccctcccccccttatggtgcatttaacatcagttggggttgctctatctctatgcaagtgtctctactagtcaatgtgcagtggctatctctcctggcctgcagcccattacagctaggcagagtaaggacaactggtgttattttacaatggctaattttatctcaaatcatccttagtcaacttgcttgcttctgttctatggacacatagataacctcattttgtaggtctttactgccagtttgatttccatcattgctgctgatttgggagtcttttcttaacccagtggactcctactttttaaagataatgttttgtacttgttgaagaggacaagataaaacaaaactttcaaggaagtgtcctgacttgtctctatggaaagggacaaatacttatattgcttctccctatcaataaattagcgattaggtgacaaaatagttctcatagccagatgggaactcaatatttcttctcattacaaactgtgggggtttagtatagaggattaggagaaagtcatgagaatttaagatggtttgcacccccagaagctcattttctgcagggctacctaggactcacttggagggatcgttatagaatggacaatagaggggctttggggtcatgccagccagggcagatccaaagtgctctgttaatggtactagagtaaccagcctttgaaggactcaaggtaggagaattatccatctcaggagaggctagcaccctaggacagaagtgaaaattcccagcaaaaggttaccaatggatctttaaacaactgcctagtcaacccttttctcttggcatcctttgccatttttgcaattctgttcttcataccctactccagcctctctctacttgtattctctacatgtgctaatccatcatggtgttcgcaggaagagacattgctcctaaagtctgcatttctagtttagctcttttaaatgaattaagtaatatttacatctatgtgtctgcttgtctgtatgtgtagaacatggaggtggaagagggtatcagatcccctggaactggagtttgtgagctgcctgatgtgggtgctggggcctggatttgggccctttgcaagaacagccaatgctaatcatggagtcgtcttctcagtcccccttttgaaatttaatttgctttgtagttcagctcattctattcagcttcatggcttccctggactctataggatttatgaactcaatccaaccccaatgggacaccagctccaggtacattaatcttcccaagtttctcaatgatttttatactttagactaagtcagtgatcccagggcaagctccagttcccccatttggaatccctacccacttctcctatgccctctgcaccatctgattttggcccaggtcttatgctgcctatcttctccatcgctactgcatcagggatgttctttcatctctcaaatcccgtctccctccctccctccctccccatggtctccctctccattttcctctccttctccacccagacccatctgtcctgcttcctgtctcctacctctcactctacagtgagccacactaaatcatctttttgtgcctggagcttgccactctgggtctcagtttggaatgctattctttcttcacaccccctattcccatctgcctagcacacatctgctcatatttcagggctctgcttagccttcttcttctctgcaaggcctcatctattacacctatgctcctactccatgtggaatggactgacttcctctttgagctttgcctcaatatataggctgtcaatggcagcttgccccttctgaactgtaagctccttgaaggcaatgtctctttcatgtttatctcgaggctttgcttttcagctcttaggcagaaaaaaaatcctttgaatgaagaatggactcgaagtagaggccaagctgtgagtaaattacagtggatatcatgttagtggaatgcatacaggccacagcagtgactcgatgcagagatagttctgttctctggaaatctcacaaggccaagtttgtaaacaagtcatgtgggcattctttactgtatgagctgactttttcagagacagccctgtagtggccagcttccttatgaagcctaatgaaacctaataaaacaattcctctttcccacaaagcgggcactagcccaagcttttctttcccagagtccatttcctggttggcaaggcagcccatgctatagccgttaggtatcagtgtgctctgcagccatcagaggtcagtctaaatactgaacagaagctaagagccgagctctgagaactggagggaatgactgagatgcacaccactcgccatcttccttctccacgagttccaggctccacgttgcaagtgtatttcagacacccgagctgtcctacttccacatccaaatagaccaacaattaattggagaccgaaaagtaattcaggacagtacttgagctttccatacacacactagacccttgattgaatcaaagccacaaagacaacctggatgccaaagatcaaggattgttttaatagcaaaatgttgtattcgatcaatcaatcaaaacaacaaaacaaaacaaaactcttctgcttagattaccctattaatttcagatgataaagccccaggcagcaagaaaaaaatgacccatctactaagaagattggctatttaattcagagtggaaatggctaggtaatattaagctgtcatggtagaaagcaagtcctggacattctgctttcacagtactatctaaacttgtaaaaatacccagagaggcagaaaggaggcctaaatttagacccgtatttaatgcattcaagagcatgattcatttctctcctgcctcagagcagcctgggggatgtgaatatacagcaggatgccctccctgtaagaaagaagcagccccatccagtgagagcctagagcaccctgtctcctctgctaagcaaggtgaacttccaagcacctcacccaccaaaccagatctctgagctcaggaaaagcccttcaggtttaatttcactccagccttggtgtggatactgccaggaatgtacttattctgttgttcttctgctctttaagtgtgttttccacccaagcacctgtggggtcctggctaaccctcagaggcaatgcagtagggtcaccccagcgagaccccccccaaaagaatgttgaagttggtattgctgtatctaatgtaatggaatgaattaattattctgtggcattgggtattgaaaccagagcatcctatgggcaaggcaaatgctctgccattgagctacagccactggccaatattggtgtatttaacaacctagacttcaagtcactgtagtggcccttagccaggcttagcaaagtaatatatgcaacatgagtacttaatgtcaattaccgattatctgaacaataataacaacaacaacaaacaagtaaaataaaaccaaataccaactgaccaactaactagtcagcaacagcaacacgaagcagaacagcatgaggcccaaccttcagggtgaaaatgcccgtggtcccttcttcgttttcattatcttctacttctaatcacattcttgcactcctctgcttccaagccagaagccaaactctatcctctcagataatttagactgaggctggtctattatggcttacaagacaaatgtacttgttattttgtgatttttaaaaatgtgtttccattttttttctcttaagattttaagcacatttggaaagtaaccttacaggtctcatcctatagtctttggatttttaggtaatctgtctaaaataacaggaacacagataatatacatatatatatatatatatataaaagctacagttaggtaacactgcctcccagaagtgagggcattatagctgtcctccattctgagttaacactttctgggggccccattgcatattcacatcaatcagtcccagttaagaaagaggtaatttcccccaacatgaaatgggtccaacaacggagaagtcaaaagaaccagagttagatatggagtcagcacgtgcatcacgttaggatgagtcttctggggtgtgtgtgaatgagcagcaatggggaaggagcacaaccacagcatgggcttggtagactgtgggagagcagcgggtccaggtggatatgagatccaatcagcctgaatacatgctttacacaccaacctcgacacggcacagagagaaggccacacactgcagggcagcatcaatgatttgtacctttctcaaacagcttggtactagttctcctgggcggttctgaagatgcaggtggggggcaggcttcccgtctccactgggcccaccttgtgccatagcataggcatttgagtcagtaataggacagtgacgtcctgtgaccttggcagagtgttatttgagatttggggacagtcatctaaatccatttgagaaaggacagatactctttagcactctagacagaaaactggctgatttagcttagaacagagttcgccatcgcagccaacttcagaagatcacagagggagagggcagggtctcaagaaggttgtatctgtctaaggctaggtcagttatattttgggatttaggggggtcaagatttatcctcacacacatagagcgccacagatccaattcacagagcaggggaatttgtctattttcatactccagtcacacaaaacagctctattctgtctttgggggtggtggggagatttcaagttctaaactataatcagcccttctttttaaacagcaatactaagtccttgtattcagcagatggtggtatttgttgcactaggctcggttcatagtacaacatcaataaatggccacttgtagagggacacacagaatcccatttgtaaaacacatccatgccgccctttctttctctctccctttctccctccctttctcccacccacgctacattgcttcatccttcaaatgcccatgtgggtttcatctcattctgggagaaaaagggacaacctgaaaagacaaaataatgtaacagagtggaaaagcaatttcccggcggtggggggggggggcggactagcatgcttagtctctgaggagacaaatcaataacaaacttttaagtgttgttttgcctgtagggaccgtttgaaaggatgctctctacaggaaattcctgtccctgggaaactgccttctgaaggctgcgcattgttagccaaagatattataactggaggatggagctaaaattcttcctccgtgagttggctaagtcttatggaacaaatatttgttccaattaggtgttccaaaaagtcttgcttgcctcagagcctcagataacgtgttttgagaagggaagtgtatttgttcaaaatctatcatggaggggaaaatgacgtgtggctgtgttctgttgccaggatacacacgctcttcacaggcctgaggacttccaagcgcaaatgtgttatgtccttgtgttcacaggccccatcctacctgggatgaggagggagagtggggtgctgactagactctactcccactcttattaagctatgtggtatttgaccctaatcctcgttcacagtccagggctcagatggctggcctgtcagcaaaaaaaaaaaaagtctaaaaaatgttaattcaacagtgttggagggttgttattttcagagctaaagtcctcagggaaaatgagaaagagctgctcgtgggattcaactccacagtgaaacatgcttctaccctgatgctctcttccccaagtcatttcctgatgcctggtgtgccctgacatttggtccacataaaatcctggaacagatttcatgactacactatcctccaatttcacacaaagggagttgtttattgtcaagactcggtatctagtaggctgaaggcactggggctgctggctcttggtctacactaaagcactttatgatatagataccctccaccctgacatttacagcaaacaactcggtctatgacctacaggcattttccatacttcttggtaatgaattctggcttcatctgtgtctcaatagcacttaacaatgagaaaggctgttggggaatagtttctagcatgaggaaaataccatacagatgtttgcccttaatcttgaattctaatgatgaaattgagaattgtttatttgttctaaagtcaagcccaaggaatttattttctaaagtctagcaagctgaggcctagggtaggagtgggtagttttgacataatatattcctagtaatgaaatatgaaaaacctggccttaggagtttgagttgtacacaaacttatagcatttaaaatggttcattttttttgtgtgtgtgtcggctttggtctactagatttctgtttgcattataggaaggacataactgaagaaacagttgatggctactttgctaaaatagtatattcactcacagtgattgtttgtttccaccaagatagcaaactaggaatcggtcctctatcttgagccatttattgaggacaaacaaatggacttggaaaagacgtgactcaatcaaagttaaatacctgactttggtgtatgagaatcataaacttgcttacggtctatctggtctgcaaacacttccccataaatcatccagtatggcatgtagaagatattcttggccagtttccaagatggctcctcattgggaaagaggatggcttgcctggcgaccccaaagctcatcagcaccaccagcataatgatgacaaagtacatcatatctatcatctggaagggcagagaaggagaaataaaagaaaaaaccatgtgattgagggtgcctgtgaatgccgacattgaaggaatccccgactaagaggacaagtggactactgaagctgatgtctacctgctaaacactgacagctgctaaaagctttttttttttttttttttttttttttaaacaagtgcatgagtggtggagctcctcttttttatgtatgtctatgaaatatatttacagctaggcacagaagtgctagtcctcagaatttgggttctccacatggttccaacacaattaaaaaaaacaaacaaacaaaaaaactgttattagaaaaggcaagtcgcttgtttgggtttctttctttctttcttaggaaagttagaattgggatagttggactattttaagaacaagtgcagaacagtatattcctactctaagttctaaggggctaacatgacttggaaagttcaagaaaatatggacttacaaatagaccaagggcagggcaaaggggagcctatcacattgctcaattctttgccagtctctcacagaatcatccaatttctatatttctcctgtagggtatcttattatggaggggattttcacgggtcttaaagccatgtggcttcatgaaccagaccagtgctctgttgttgacatgatgggtttcctccttggtgagtttctaatctcctcctggtggaagcctgacacctttcctttccccactttccctttcccgacaactttcctttccccattttccatttcccatcccttctttgttacagtgctatgtgaccagacatcaattgctttcttttcaacattgaaaactgataagggtacagtaagtggtgatcctgactggctccaaacccacggcttctttctttaacagccagttccaacgccatctgcctagaaagataggtgtgctgtccaagctaggctagttgtgggacttcaccccatgtcagccatggtgaggcaggcacttgacacaaggtatgatcaccagatcctcagaatcttttttttttttttttttgagatagggtctctatgtgatctcaaagtattttggaacccactatgtgggtgaggacggcctggaactttgtgattctcctgcttcagcctcttgtgtgctgagattacagcccgctctaccatttctttaaagcagaagtagagagagaagttccctttcattctttgtaatgttcattctttgtgaccatgtagcatgctggaggttaaccttccccaccagtgaataagcagagtatataagagaaagagagctggttctggcagcgattgaactcctgtctcagtagtctttatggccagttccaccttgttctctctaagtcagtatctctctcccacctttgagtttcggaaattggttttcactccgtgtgttatactgtctgacaccaaagacttcctcctctaggatattatagtgtaaaaggggagcccacccacagagaatgataaatgctagttatcagtgataaagaaggtcctagactgttttatttattattgttactgttgtgctggggatcggaccaagagcctagtgtaagcacacactctactatggacctattttctcctcagcttaaaagagaacattccatggtactggttccagtactgtaaacgttatgatcttctgggttctttaggacacaggggcctcagtatattttagatcaattcatcaattttcaagacaacttcaaaatacatctgctaaaaaattaagaccttgaagcaggttggaatttctccaaaattcctcctttccatgtcttcccaggtacaagccagctgttattccttctcccagttggtgggtgcaggtctctaagtaggtgagatggctgtgttgaaacatgttcctaggaaacccaagtctatgttccatcttctctctcctttttattttgtaaaattctttgatcatttattgacagaaatttgtatcaatgaaggagcccagatgggtcttcatgttatatttgtctacacagattaaaagatggggggaaggggcgggaggggggggaggaactaggtatatacatgagagtaagagctagtctgccagtaagtacagaaactgcaccaatttcatttctcagccttttattttaaaggttgctcctaatatctattcacagggtcaaaacagtaaaagaaaaaacaaattcttcccatatgccgagctttccctgtttcaaagtctttactatcttaaaaatatcaggatctgagccccattaataaaaagggaatgggacttcttttgttttcaaagttaaattatccagtgagttcaatgttaagatcctgcccagtcttacgaacacctctcagtatgttcaacagagaacatccacagtggtgacgagccacatgctgctaggtgccagacaacctgggttttgatcccaacagctagcaaaaatagctacatggaaaaaaaaaaattccaccaaaaaatccttcccctgaccattaaaaaagacaaagaaagttcactaagtggcctggagccagttgcttaatcttgtttttaaatgttgtaagtgggataataataacaatcacgagattacctttgactaaatgggatggctatgcggtaagttctcataaatgctaatgtgttgttattggaaggtcaggatctggagtcaggagtttgaaccttgtccctgtctctttcggagtctgtttatttaattaatgaaggagggttctaaactctattccatggggtttaataatgaggactgagctgtgtctcccagggtgcctagcacagaaacacataactcctaacatggtttctttctattccttgttacacaagtgagttactccaaggtttacagaatttccttgaaaaatgaaatatgaaagaacagagtcaggatttcaagtgaacctggacctgcactgcatatcaacgggactcacagtggggatggatgaaggaggtctgtgccttcaaacattgatttgatgggctgtttttttattgccagcacagaaacccaattcagaacgagcacctggccatcctgtgtttggtctctagatgtctacctgggtgtggagtactaaagagggggcctctaaaagttgagggctttgtatgtaacacatctggggagatcttcagcttccagcttgcagtccatctggctcactgataaactctaaagacttttatctaccttctggatcgatgactcaattattgaactaattatcttaaaagcattctgtgagaactcaaagtccccaaatttcctacttatttctgactgataaatgaagtcattcataagttaaaaaggagagaaaaggcatcacatccctcctgctcgtttcttagtaaggtttcattctagttgaaactggggtaatcgtgccattattaaaatgataggcatggaaattaagataatctcactgtattaatgtaactttagatatttcaaatatttaaatgccacttagacttttaaaaatagttgacttggtttgggtctttgaatattctatctgttaaaataaggtaatcataaaaaataactatctgattaaatagtcccttgatgtagtggttcttgacagagggtagttttgtgcttcagggacatttggtaatatttggagatatttttgtcctagctctctctctgctcttctctctctctctctctctctctctctctctctctctctctgtgtgtgtgtgtgtgtgtgtgtgtgtgtatgtgtgtgtgtgtgtgtgtgtgtgtgtgtgtgaaagctgctaaacatcctgtaatatacaggatggagactcttcagcaaagaatcagggggtgtggtatgcatgcttgcagtcctagtacgtaggaggcaaaggcaggagaagggtaaagtccaggtcagggtgagttacatggtgagacactctttaaaaaaaaaaataaaaaaagtgtcaaggtggagaaaaattggcctggtttccaagctgttatagtttgatatttttttttttcagtttacttggaaatatatttgagaatctcaaaaaggccccttctaacagctgacctgaaaatgggcaactcttgctccccagactgacagctgggataccagcatgggactgatccagaccccagggaggtgggtttcagggaggagaccttggaatctatgggacctcctgtagtagttcagttcttatccctagcataggtgtggactttgggagcccaatccacatagagggatactccctgagccaagtcacacagaggtgggcctaggccctatcccaaaggatacgatagactctgatgacactctatggaaggcctcaccatccagggggagcagaaaggatatgtgataggtagggttttagttgggggtggtggtagggaaggacgtgagagagagggaactgggattgtcatgtaaaacaatcttgtttctaatgcaaataaaaaaaatctgggagaaaaaagagaaaatatcccagttaaaaagaaaaaacaaaaaacaaaggccccttctcttcagaaatccacgtgcacattttcctatataagctgggagcagggatccacaggtcccttccttcaaacacattccacagagtctacttttagacctaagaattgtcacccaaatctctaatccattgttcaacgaagacacaatgacagaataaacaaataatgcacatttccccccttctcacacaagttaaactgggttcagtgtgggtaactgaagctccagagcccacgtctcctttctctagaatgtgtctggagctatttaccccaagtgacactggtgtgatcattcccagtttgtgtacgaaagggttggttgtatagaagaacagtgtgtttgtaaacttttctttcttcactgtcctttaaaaagaaaatgtaaacataacgataggagacatagtttatctaccagctatttttcagcacgtgccattaccaattatcacagctcttatgtttattgttctttgttgccttagaaggcagtgaactgaatatcaaagagtaaaggaattccatttcaaatttattgttttcctttcttttcatggatttgttgttgttgttttcttagtgggaagattttgagttgtttaagatgtatttaagtagatttcatacacaggggtttaataagtactgaattagcaatgatgcttatagtaaaacttgagtggcagtaaaaaggcatctataatgccacttgatggtttcaatggctcatagaatggaactagagatgatactaaagagattcttatgaggggatatttttccaggtagggtggatatgcttagctttctatatagcagagatatacatgtggacatcaggttctggttattcccctagagtgtctgagaaaggagctcatgaaccagcaccccaccccccaaccctcacctatcaccaggttcacaccaatgtcagacacctcaaattcagtctttatgggaaaattctggaagctggaatatagtcaggaagttgaagttctcagacatttgtatagaggtacattaatttgccacttgagagtcttttattttaaaccattagaggagctggtgccaggagccaggtttagtcaagagttttccccagtactcacaaaatccctggtattcagactctgtctccctaactcagatcaactcaacaccactctccctttgggagaaaatgccactttctaaaagagctttatttgatcttattttacatttggttgtgttgagacaagcttttgctgtgtaactctggatggcctgggatctgatgtccttaactttgcaagtggggtattccaagtgagtgcaaaacacccagcttcaaatgtcaactccgaagctcatcttttacaagtcttcaaaatctcttaatatttttagtggagaccagatcctcctctaaatctgaccaccgtgaacgttctgcgtgagcctgtcctgacttgtgattctgctggactacataggtgtcactctcgggaccttttcaccctatatgcaaaggactctccttcctttgtctaagtctcatgacatgacatctttgctcaactatttttctttttcttttcctagacaggatctatctgtatagccctagccatcctggaaccctctctgtagaccaggctagtctcaaattcagagatctgtctgcttctgcctcctgagtgctgggatcaaaggtgtgtgacaccactgcttggctttgctaggctcttaagccagtgcctggcataaatcgagtgatctttccatatgcttcagttagtaaacaggcgtctgatgattgcactctttagtttttttatatagcaatagagtcaaatagagtcaaagcactcaaagggaattaaaacacccaaacacccctggggccatctcatgcagaccacagtagcaaaccaaaatgaatcacatctctctttctattatcatggatcttcctctgggaaagagtaacacaggaccaaatgaccttgcttaccattttcccaatcatcattacatatgggcccagatacttgttcacgccgaagatgtctagtaaacggatgtaccaataaataatgttcacacagtagatgaccctcccatcactcctgaagggctggtcttgaagacgaaggatcatgcccacggagaagagaaggatggcgatgaggtctgtgacgttccagtactcctgcagccacactttcactttttgcagcagcttgccaggctctgacatcaggatctgcaaagcagcacagatggttaggcctggtttctcctatactttccgctcagctggaaagtgctctgttagctgacagaaggggccgtccagacctgtgtctagttgagtgtctatatgctatgaatgcataattgaactaagcctgggtaatacagatgtgctcagtctaaaagcagatgtaaacaactggtttgatcctttggattttctggcaattctgagccacttcaggcttttgctataacattttatattcctaacatgctacagatccctacaatcatcttagtaaatagcgctgagtgacatggaccactcctacaggacacctccattcctcttgtatcagcaagtcattatctgaagtccaaccccgttaatggcttgtcatcatgtccatgattgccactgaattctaagtcccattacatcacgcacatggttgcaactcttcttatggcatatctgctgtcattgtggccaccagactaccatccattttctgagcaacatacagcgagctctttaaagatctaacccttgatgtggttggcgactacacagttgtttgtgtaagccaagactcatcaagctgtaccctgagcagggcttcctttcattaccggtaaattatacctcatgccttagaaaaacagacgagggacaagcaaaccacagtaagtacatacttaaactttctgatggctttcattataaacagaccaaaagccagactccttaccatggcccgctcccatcccattgcattctccctccttctctccctatgccacactggcctgctgggaagcataacatgctcagcctaagctcatggcacttgcatttaattcttttcatttttccaagagtttgcctgtttggctccttcttatccttaggctgtgtattcagatgtccccttcttaggaaggcctctgttgaccattccagttgcagtagcctctatgtctccaaacagacagatacctgattcccaccactgacttcccacttgagcaagtgtggggttaggccaggagattcactgtcctgacttgttcccagatcatgctggtgaccatggtgtgagatccactgtcctacctacccaccagctctccctgcgactgttgctgtcctgttggctcctcaccctctgctttcataactaggtaaacatctgagcgtgtgcatagcaaaggaggggcagggagggtggaccacaccttagtgatgcctacccctctgctcgggagttgcaaaaacttctattagagacaaggagagggagaaggagagagagagagaagggaagagagcggggagaagacaggggagaaaggggaaagagagggggagagagaggagggaggagaggaaagagaaaggggagagagagtgaggaaagagggggcataggagagctcctcctctgctctatcactgctaagccagcctttagcacaggccttggtatcctgggacccaggaaagcatcatggggaaatggaaaggggagtttcagatgatgcaaacaggtttcagacctctctctcttccctagttgtagcatctcaaacaattgctccatcttgtttcccagacctgtaaagtagggatggatatgatcatggctgttactgacctcacagacttgtgtgtgtgggggcaccgggtgagataatgtctactaagtcttgctgtaaacagccccatactattaagggattgctgtggctggttctggtgactacatgcagaagtatgtggtgaagagaatgggaccggcagcacatgaaaccacagccttccttgtgtttgcttgggaggcacggaagcatgcaaacttttccatgcttccaggatcttgcgtctggattcccgggggcctgtgtgccaaccacaaggaggcaggaaggccggtgcttgtgggaattgtcacccactcaatagctgagcctcgccttcccgagttcaaggcagggacacaggctgagagacgacctcaccaatcgcagagaaaaagatcgacacagaaatggccacaaccccccttcccacctctccttcagtggcaagcatcttcagctgacccagtcctgaccctgtatcgaaagccccacccagcttgccatgacatgcagcttcataagaaatggatggccaggcctggaggttgctggcagcctgcccacttggcagcctttctagaacagtccgaggagtacaggctgctccccgtcttcttccagcctagtccctggacagcctccagtctccacactccagtctttccctcctctgcttgtgatgaggaaggaatatgtggctgggtgttaagtctctggagtgccagctggcactatacagacacagaggcagggccccccagcgggagcaggctcagttctcagagctacacaaagtcccaggcaaatttattactgtttttcagtttgcaagcccattgcgctgctcaagcaatggaaggcactatgaatggttgaacacagtgcagagaactgaccgaagcaacataaggcatctcactgccttagtccttagtcatttagccaagtctctaatcgggcttgtgtaccactcccaagctctcaggaggaggaaatgccagaatcaaaatagcacccacacagccccagagaaaggtgctgaatgcaaaggtgtgtgtgtgtgtgtgtgtgtgtgtgttgcaatcaaatttaaatgtaatagatacagcatctttcttctctggagaacattaagagatgaaattcaccagggcaagaacatttgaatatgtctgggtgtgaaggtgggtttgcggccccattccattccgtgcccacccactgtcatacagacaccagggttgtgttggagctcccagatccgcacagacttcacaggatcctttcctactgaaaaggcccctcccactcactgcagtttctgggaacatgcagaggaggagttgcctcaccttgcaagcctgccttcccggcaggttttctctggtgaggtaggagtttgtggagagcactgagcaggattgctgcgccctcttgtggactgtttcttgaccacatagattttagaagctcttggaatctaaagggctgcctgctggggttagcgtttcttttttaaaattaagtttaaaaagcagttttaaattcacaaaggcctccttttttttgcaaatggtggaatgatgttgacatatcacccagagactatatttcatatcggggttcactgttggtaggatgcattctatgggtttgaacatgtgtaggtagaatgatatgaaaccattactagagtagcagacaaaatgtatttgtgtccttagaggcccgagtttcacctactatccttccaatgtcctaccccaggcaactaatcttcttaccactccatagccccccccccatctccatagctaccctccatctccatagctaccctccatctccataggttttcccagaatttcatctggctggaattatatagactatcccattcagacatttttctctttgaaacacatttcccattgcctcatagcgcatttctttttagcactgaatatttcctgtccccgtggttagctttgatttcaaaccaattatataggggtgacatttcaatggctccctttagtctaaatggagggaggtgaggagagagactactgtatcctcaatgtgaaacaacacaatggcgttccgtactccacggtgctccgtgggggtagaagagctgatagatgcccagcatgggggtgacagacgttgagaaggaatcaactcaagaataaaccgaatgaaggggtacatgcagggtgtctctccctctcccccgctgaagttgtttctctccgtccaccatgtgggttctgggtatcgaactcaggtcattgggcttcatgtgaagccgctggaacacatttggagaggttgatatggattgggggatagtgtccaaggagaccccaagaaaggggttgaaatgggaactaaaaaaagaagcaaaatgtaaaaagtcatcttcatagggatgagaagagggagatgtaaatgatatcgaggccctctggaggatgtcttggggcaaaaggcacgtgagcagaaaacagacttaattgctctaggaaacctctccaggtttgacaaagaggaaagcggcagccctcagcaacattacaggacccagtgtggggctaagtttggatcccaagcatccctctcgattctccatcctcagatatgatgagcaaccatctccctcctgtttttcatttatgaaatagttacctctctcatcttctctattcccagggtgaaaatgtaggagatgacgatccattcctgagtggaaggccagcgctccatcttcactaacacgatgtaattgaagagcatcagatatccaatatacgccagctgcaaggaaatacaatacggtactctgactgcagaggcctgggtaagaccactgcatggcagcaccgagcaaggtcagtaagcaggacagggaatccatggcgaatgagctatggaactttaagtaagaaagaatatttatgtatttctgtgtgcattcctttggaggtctgcagaagttgtttctctccatccaccaagttctggggatagaatgcaggtcaccgggcttgatggcaagtgtcgttacccgctgagccatcactactgcaaacatttttttttaaaaggccataatagttaaaataattgaatatggaatgtttttgacttttatatgtgtctctggggtcctagtgcatttattgaatcttcgtgttaccatgtatgaatttgtttggcaatcaccagttttttttttttttgttgttgttgttttgtgtgtttgtgtgtgtgtgtgtgtgtgtgtgtgtgtgtgtgtgtgtgtgtgtgttctggcttagaaaaaaacctggcctatcagcgctcttcttacttgggcgaagacttggcttcccatactaaggtgatacagtatatatatatttttcctgaaagatgccagatagattaattcctaccagaagaaagacacatatagtacttgtaagttggcaaaactacagtgtaagcagcctagatgtaatcttaaggccccacttccatgctgtcctaagtagatgtttttgacctacagtggttggcttcttagggaggattttgaccgctttcccactgtcctgtcatcctgctctactctggttggaacatttgagcttgccttctgcctttttttttgaaacaaagcaagagaaaataaagcagtttacaggaagggatgtgacctgctgtgtaccagagtggatttaatcctctggaggctccagcatctggaatttgagtcctgatgtgcctggctgaaatgctggacgtgggaaacactcctgagggcccaggcttgtaggctgttgctgaaagactgcagtgatgccaatgtggaaagaagagaagtggtggtgctcttgcataagaaaatttagcccatggggggggagggagggatggcagatgagtgaaatatcctgcaggcaatgttccaagttgagcaaggcactgactggcctcaggggctgtgagcagagacccagagtgagctgactcaagtctgtattctttgggggtggtgtggccatgagcagggcagcatgtgggcaggaggattggggatctgaggtgctgaaaatattgggtgactttgggattgcaaaggcaagttaggaggcagaaactgcagcctggtgaggagaaaaaaagatacaggaccagagagatgtcttatgtaccaatggtcttcttccttcatttcagtaaattggatagatgtttaatgtgaatcaaaggtacctctgataccccattaccttgatgacacatgtccaggtacaactgtggcaaagaattccctttctgataagccaagacctgggcatactaggcaaacactctaccactgcaagatacttcccagccagtccttcctgcatctaaagggtgaagcaacgacagaagcaaaggatataacatctggaataatacaactgtgacagtgagtactgcagctgctgagggtgctgagctcttccacctgggtgatttggttttcatatccccatgactactgttgcattaacccatgtctaggttcccacagatccccacttaagaaccactagggcatcacagaactttcacatgagagaggcatcctctaaaaattggttccaagtgtgatttggcttgcatggttatgagcaagaaaacaccgatatactctgaagtccttgtgagcacaaggactttgtgttacaaaacacaaaggaagggagtcagtgggaaaactctctatttccttttgcctggaattgcttttgtcttcctggtcacgtccttccttttgttgaataaaattctgttgcttcaaggtggagtgactcttaagcgccctggttttaacattctacaaagttcaatgaaaacattccaaggcattgtctccccttgtcacatgttggccaaatgacatatgaactcatttcttcagaaattctttgtcttagaatttcagtaactttactaacaggctccaccctctgaactcaagtctactgtatttggagtaaggaatgtaggcagagaaactcggaatggaatttgtgtttaagtttcagttcatgcataccatcttataagtcacctaacctagagcgtctaggggagtgcttgtcactactggggaaacccacagtatacatcatgtcctctgacttgttgtcgctttgtaccttgaactcaaaatctcttccagctcataagatactctgcccagacaggggctgtgagccatttggatctgcttccttctatcttggatctgaagaggacccacctgttcctctgggaagctgagatgaggacaagagttcctaggggattgagttgggtgttctctttggacagtgtcagagaggaggaagggatacttctagagatcagagaggaaatactcttacagaggacacaggtcacagcaaatgggatcatcagtctgatgatgaattttattgttaagtattgttggggtctcaaaagtttgggaatctcattgccattcatttacctcgaggcctgggttttgtcaacaattgaacacaaacttctggaattgttcaaatataactggggaatttagtgtgatggatttactgaggctaacccagtcagttataggagagagagagagagagctggacacttaaccccaatatcaaagatacagctcctgtggtagtttgaatcagaatgtccccggtaacttcatgtgtttgaatgcttggtctccagttagtggctatttgaggtttcaaaagactcacagtattttgagttagctttctctcctcatacttgcacatcaggacgtgctattcctcccactttcattccatcatcgtggacactgaccctctgaaaccataagcctaattaaatgctttcttctggaagttgccttggccatagtgttttgccacagcaatagaaaaataacttagtgtctcaaaacatgctgcaaatggtctttgaagcactgagccctaggtttctgtaatgattagagacacctgtaactttaattccatagaattgattcagttgggtccatgttggatacttgaattgggacttctagtaaatccttttctatcatgggcattaaaaaaaataatttaaaactcactactctctgttccaagttagggctttttaaccccatagctgctcatgataatgacctggaaagctctaaggctgtacccagagggatgacatcagagccctgaggatgaaggccaggcatgggcatgcttttaaggtgttccaacagatggacatgacccatccctaaaatcccagaggcagaggcaaggtgatcatgagtttaaggaaaacctgggtgagaccctggcttaaacaacaacaccaacactaacatcaacaccaaccccaacaaaactaaaccaaaccaaaaccaaaaccaaaagtgtagtgggtgattccagggcacttgtgattaaaaagcatttggggctgaaaaagcctcagttgagttaatggagagcaagagaatcaaggaattcaaatgatgggaatttgaaacctcaaagaagaagaaaaggtagatgacttggaaggctaagtgaggtcagtgttcatccaagtgctggttaattctttatgcaattctctccgccagtttctcctatgctttagaccaggaactggaatccactaacatttgcaaaaggccacaggatgaatcttcagggttctgtaagccaagaagtttttttttttttttattaacttttttttttgttgttgttgttgtagcacacatgtggccaggtgtagtgaacactgaaatttgaatttcatatttcacaaactgatcttttttatttttttaaaaagcttatttcaacattttaaagaaaggttcaaaacaaaacaaaacaaatcagactggggttgtagctcaggggtgcagcacttgcctagcatgcctaaggcacccagtgtgatgtactcacagaataaatgaaataatgcaaaaatgagttggagcacgtagactgtaagagtggcattttcctttgtggctatagttttcacactcccccttttggttgtgataacagagtcagaagaatagaaggagaaggacagatgtgggcataaaaaggagagacagatgttgtattagatgaagttgttgtcagcctcagggaagttatttaggaagcatctggacccttgcttaaacacagtagttgctcaataaatgatgcttctgctgttgagtggacagatgactctggcattgattacctctcagaaatgtgactagtttaggaataacactagttactcccatattgtacttacggatccagacactattgtaagtgttttatatccctcaacacatcaatcttcctaaaataggaagtagtattatctctgtctacagaagtacagaatgggaaagtgccatgtttggggtcaaacagagggacacaggcagacctgtttgtagcctgtctccttttaggctacacaaagtcacacagctccactactttttatgaaagagtgctgtaaaaagatgtaaactgaatttttgaatgcatgttattttgaggtggctattattttagaatgtcaatacatttgaaattttatcttactattatgaatataaatgtgatatgtgtatttttttgtgttagcactttaagcatttatgagcctctgcattaaccgactcccctgcaaacagaagcttctctaaccaaggtgaagaactgcactaatctatggttataaatgtttagagagccacttggcatcatgtccatttagcaatatggtagttggttctcccttagggtctctgatcgcctcagctctggccagctttacagtaccaagtatgatctcctcttgtggaaagcagttggttacccctatagcaatggtttctgtttttaaagtagcatagtattttatgttggtaaaattgaactttttttaaatttaaattctttaattaccactcatatttacttatccattcccccatgtgatatgtatatttttatattctctcatactctattaagtcatcccttaaagcagcagcttttaactggggtagtttttatcccatagatgcctggaaacattttggctgtcacccttaaaggacagagtgcagtactggcatctggtgggtacagaccagggctgctgctgcatggcaaagaattatcctagctaaaatatcacgagtgctgaggctatgaagtctccctctaaagccagtattgaatattagtatcttgtaccgcacaggaagcaacttccatgatcatttaagccctcttgttctcagacctagattatcctgttgttgactcccatgactgctctatagctggttgtgagacactctaaagattcagaaacatcatcagctatctggtgtagctctaccaggctgtacagaatcactttaaacttccatggttctctacctgtgggtcatgaccctttgggagtcaaatgaccctttctggggtctattcacaggggttgctcaagactatcacagaaaatacagactcataacagtagcaaaattacagttacgaagtagcaatgaaaataattttatggttggggtcaccacaacatgaagaattgtattaaagggtcgaagcattaggaaggtggagaaccaccttcgttgaaaaggagaagggaaccccagcaatgtccctatctatgatatcagacaccattttggggaagcccatggcttttcgggcaggatgtgtgcatagggtgtgtatttaccaggactggaggttttctagctttgagctgcatgctgtttaattgtgcctgggtaagaaagtgtgactgatgtcattaccagtttggaagttgttacttatagatgttgtctgtccctagaggtgctgcatctacactgtgtgtcaacctgacccaccacacgttccctgaagcccaggatgagcatctgtaatgggccactctgtctgggttctcatccatgaggcaacacagaaatgctctggaagaggacatttgttttcacgttgaactaactcatacacatctcacatctgcttctattatgcctcactgccaccagttccttcaccttctgtggcaagcataaaggcagtcaatggacactgcccagcaaggtcctcaaatcttgtgaaagtactgggaaaacaacgtcacagagctttcattcctgcacatgtggtacttataatgctgctcagacaaagccacacaggtgcctgagaaaggaatgtcttttggaaagggggaagggaaatgcttacagtgtagaaccagaacttcacaatgggtgcattgtagaactcgtagattttcctgcccacggggattagccggtgcctgctttggacttcttcttcatccttctttctggatgactccccgttgtttcgccccaacatcgcctatggtgtgatagaacagagaccatcaaggctgggctctgtaggccacgttgcagaagacaagtggatgctcatggcacccaagagtgcgtagaccccaatataagccccaccctcagagtataaagacatgccttgtctatgtgtgagcttgcactgtattagttcaagctgtgtatttcttctaaggatggaaggcttgggggatatttcttgagccttcttttcttttctaacttggaccctctgaatgaggtaggcagtaggatatacacagagttctgagagggataatatatactgtttgggaaggtcaggctacagggacctgtccaaattctgttactttcttcccatatgtatatgagacattcgaggtctgaattcaaattctgtctacacctgtgctagtgactttccagttgaaggtggattgattggaccagagtccattacatatccaaagagcagaagtattcaagttataagttgtctgaagttcttggagtttagttaagctaggaatatctctacccatatcaaagtaagggcattggtccctccattttaaaccttgtaagactggaattcctgctgttatcaattttatggtcactcctgagtacactgccttcctctgcaaccaggtgggttaggagaaggatttgaggcaagcctgatctgcaacgaccctcgtctgtaagatgctggagatctctgtaaacatgggttccctcactgtccatcacaacagtagaagtttgagtaataatgatcaaatattgcaaaaaaacagcagaatcgaaggacaggaagacacaccctgtctgggtagcaagcaacaggatgtcccagaaatgactgaagatcccaacagtgaatgcttgtgggctttggatgactcagatgggagggtaagctctaagatgaatactcagaatctttggactcttgggcaagttattccaacctctctgagacctatggtctttagccataaattgggctatggtccttgggggcctatgcattgatatctggcacctaattaagtgctcagtaactactaggttgtcttcaaagtgaacttggactttcttagatactatcccctgaaggtacctaactagaaagatgtgcatgctatgggagtcactaatggggcaaactattggctttaattcttcaatattgttaaaagacatataaggttaattatacaatgctgagaaattggaatttttcttttttgcagatgtgtggtgaatgcgtggtatatgcccatgtgtagaggtgtgcatgcagaggccagaggagggtattaggcatcctgctctatcactctccactgtatacccttgatgtaggagctctcgctgaacctggagctagtctgatggccaggaagccccagtaaacctgtctctgcctacctctcctgacacatgtgaccatagctggctttttatgtgggtctggggacttgaactctggcccttatgtttttacagcaatttctcttacctgtggagccaacccccaagcctgagattcttaataaacgtgaggctaggataagacatacattatagctgctcagaattgacaaggatttgggataagactcagtacttggcatataagtttcaaattaagagacctaatttatagcaatgattgcaatttgtaatgacatcgaagacagagatcactactacatgatttagttttcaaccacctgacacagcacataacaaataatagtttcaagaatttcaatgatttcctcatagccagttcatttgactgtataacactcacaaatggtttatgtctactaaggaacatttctggggaagaaacctccattcttttgtatagcctggtgagaaagtgccttgagccaatggaaggaagatttccctctatggctgtcatatgtgtctattttcatcagtgaattgaaccagtattctgatgggttaagtacaggaaagtccagtgacattggtcactggcctcaagtgactggcggaatgagatgtttgttctatagtttatgtaacaattattcttctcctgttcttgcttatttctatgcccgacaatccagtgccatttgggggatatgatggaatgaaagtaaagacatgttgacatttttaaggtatcttagggagtgtcatcatggggtaatctctagggacagtgtctttgttagcaaatcatacatagccctggggctctacacatgctggggttgttttaggcttaagtgcaggatggcacacttccttggctaagcaggtgaaacaaaagcattgcagctgccttttcctttgttactcacatacgttctgaggggtggggtacatttgcaaagtcttgtcctttacacatttaccatttcaccagttccagccttagcagcataactctgatttttgttgacttctttcccctgtggtcaaacatttcctttgatgttgcttaaaacagaatttaaaagggccatttatgtataaaagaaacacttcaaatagaaaacaaaaatattttctagtagaaaatgaggtttgaacggggtcagctatatcattgttcagtgcagatttgagaccctgccagatggatgcaggtgtcaaagtggagaaagatcctttgatgtaaaattaagctgctaaaggctacaaacatggtgcaagtggagactgatattctcaggtgtcattttggaagcaaccaaggatgtcctgttctcagaaaggatgcattcatttggctagaagctcagatatcatccctatgaagggaatggtcttggcaacaagcttctttctccaatcctgtccagggtgagctgtttgccaaagaaggaggggacagaaatttgccatcagggtgaaaagaggctccctttaaggacaatgctgccaatcaaagcttgcagcccacatgtgcccacattattcttctctgtgaggtttctgctcatcatcacacctcctacttaggttcacagagaacaatgttaggaccgattccctggcaagcccgttatgctcttggactagggagacatattttacagtgacttcctgaagaaataaagtccccaaagctcttaacagaccagcaaaactccttcctctatacccagactctgagagcatctggcagcttctggatgtcctcccaggatggctacctgtgagggagccacaccattcttgatctgggacacttggcatcccttggaggctctctacactgtggtaaactaaatccattaaatgggaccattgaagaatagaacagaaaataattctctcttgcctttgacaatttactgaggttgttaaatgcttaacagccaatggcgtatgcattcctggattctaatcccacctttgcaactaaccagttgggtaaatgtgggcagtttaatctctgagtccttgctttctaagctgggaagtagaacactgtgttcctaatggccatgatgtgagggcagatagagtgtgtagcaccattttaggaacataagcaaacatttgttaatgtttagttgttagtccgagtagtttacatgtatgtttctaatcagtttactctttaaaccaaataacctcctgcgaggcagacaaaactatacttccattcttgaaggcatgaaattgtctgtaaggtcatatagaaagtaggtaaagggtcaggattctgactctagaacacatactctttaccttcctgctgaaatagccagcaagaattcagaatctcccaagctatgaagccctatttgtccctttaatagcacaggctatttttagcctttggacacaagccagaggcagtcctgtcgcttgggtgggggctgcgggaagtggttccatgcacagctgtcttgttctctctgcagaacaaagcatccatgttctataattataccaggaagcgctaataaaagctttccacatgaacctcaaaattcaattagtgatggctttgtgactttgaccctgaagacagatacaggcttagcttccgaccaggagaatggtcccagctcagcaaagctggctgcttatagctcatggcttccctttctttctcgtgtgtaaagactgccagtcacatcgtcatgtttataaacaggatgcttgcctggaaaattgagggcatctggctctgactttcatcgatttgttctgcagcatgttggcagaaggactttccatacagttggatcctatagccttgctgtttgcacacaaagagggaacttttatgatactgtaatctcaacactcacaacattagacctggcaggaggctagggaagccttatctcaagcattgttgaacatcaatgcgtgagtggctggggcgaggctccccaggcagaaaaactgcatagtgttttcttactgttagctccatgtcctcttcatctttttcctttgtggtcttctcgggctcctctggctccttctcttggagatgaatttcttgggcctgagtcatataaggcatgtcatctttgttcttgaactccaagctgagaattgaaggaggaagtagaattcccagaattacctaaagtaataacaatgataataatagtaatcacatttaaaggattaagattagggtggttgcttagaatcagagagcctgggatgtggcatttatgtgggtgtgtgtttgtgcacattcatacacatccacagctattgcatttgctatacagagaaggggatatctggaaatctaaacacacaagaaggtgactttttggcccatctaggaaacacttactttgctcaaatatatctgatctcactaattcttactttatgggggaaactgaagaaagagcgcttactcaaagcaaagatgaaaaaaatgagatttccatttagtcattagaacttggccttgtaaaatcaattcatacacactgtcatttttttttgtgagtatatcaagtagagttgatgtgtcagcgggtggtctctgtaaagcagtgctttctaccttcaccttgaagacactttatctgcggtagaacattctgctggcattggctaatgctcaaacagaaacgcctctctccacagacacctctgtgtttgtcaagagtagttggtccccttgcacaaaagccccaggaaggccagcattgcattgctctcatgtggaaacgctgtgtgtgaatctcagtgtcaggatgctcactacctaggcctttttcatggcagagcaagcgcctccattgtcggagaagagtgcctttcccagcttctctctttctaaaatggctccagtgcacaaggctcccgaagatgagcctccctgaagacactgcactgagaggagggagtcagacagatcctgaagtgaatatgatgcttccacagggacagtcctgtggtcctgaaatacccatgggaacttagggtcagtcaggagaaaaggaccagagttgcctctggactgtaggtgttttgggaggctcaaatgacatgctggcaatcttcataggatacaataccctgtccttggagatgacaactggcttggctgaccacctgaggccagccttggcagttactagcagcatgactctggaatgtagtatatgacccactttataaaaccttttttgtaactttgggccaagagcctataagaaagatggagtgggacaaacagtgctggtccagtaaaataacagtcaaagagggcaagatgcgaaattgtggtgtgagtctaaggagcttatgtatctcatgagtaacatggtcatgatgtcatactatatactagcaatttgttaagagagtagattttagccagtcttgccacatgcacaaaagggtaattgtgaaatgatgaatacaccaatttgcttgactctggtagttgtttctctgtgtacattaaagcatcatattggtatcttaaatatttataattaaaaactggcatcataaaaattaaaccaaacaaacacccttccatttttctcttgatcatttctctctctctctctctctctctctctctctctctctctctctcttttaaaaaattctttcattttgatgtcttccttgaaaatcactaaaaaggattagaggaaacaaaaagtgggctgagggtgtagctcaaaggtagagagcttgcctggcatgtgtagggccctgagatcttcccccaaactgcaaacaaataaggcttcaacccaactttctgttcttcagaacatgtcccatacatggtgtatttaatacctgagagcattactacagacaatgaactacatgtgttcctcttggttttccttaaataaatttatgtatgtccttttaaatggccttatgttgtgtctactggcctgtgacttgcttttgagaatagctcagggaccagggatatagctcactgccatgtgtgaggttctagatttgatttcaaacattttttttttttttaaaatgtgagtaatgccttgatatacaaatctatctccactttagttcagctgaagtttctcaagcccatgttatcagagcccatgtctctatgatatgaagtaatgcaaggatagtctgggtgggaccaggagggtattcagcctcacagagcactgaagggtggcttaggtgagatctctatggtagcatgactgtgcaggagtgtacagtgccctatgggaactatgggaactctgtatcattggatctgcgaacagactctgttttaatgggccttaagactggtgtagagacagaacaatcaatcaatgactagagtgtatgtatcgtgccttcgtaaatgtgtcagaccccaagttcaaatccctgattgtaaatgaaaatctcttctctaaggacattctaaggaatagcggtaggttagcatcacctcccagtgtaagaccattcctagatctgttatagatttgatttggaaaactccaaccaacccgtggactctatggcaacagatgatttttgggtatgctgaccttgaggcctgagttcttgcgcatgcggagccggcccatccacatgtcagtaagcaacatctggctgcacgtgtgtgcaatgaagtcacggtgcttggcagccacagccagctgcaggcatgtggcattgctccagttcttcaactcatatgttagcagtttcatggccagctgctcatcttgcttgtaggattggtccaagagttccacagccagctggccaaagtccctgaaagacaagtcacaggagagtccttcaggccaacttgggtacctccgtgaacaaagacgggccctactgttcaattataaaaggcagcttgctgtgtggagtagctgtttcatgtaaggtctagtttacttataaagtcacccagtcaacatcttttaagtattcactatgtgctaggtaccatgtctagaactgaaggtgttaagtgagagcttgattcctgtactcaagactcccgattcagggcatatgaaggtagaggcagaataatcaaccagtcattagagtgtaatgtgtcttattaaatgtggcagaactcaagttcaagctctgcttttgccaaccatgtatgatcttggccaaatgacttaaattctctgagatggtgtccttagatgaagtgcatgatgctatgacttgctgcttggggcagctgagcggatgaatgaagtaagtgtaatctgtctgtgcctctatccaacattgcgcacagtaagggtaaattactcatgtcttccctctgtgtaccctagtgaggtgactctgttaccctttaaggttttggggatcccaaaacttctggcacttggagtctacctttccttctctaccccaccttccccacgagtggctggccaacctggaattgtggttcagctcctgggaaatgtcatcaaccatgtcattctcagaggcctcatgagccatggctttgcagagcttgcaggccaccaaggctttggccatggcctcctctccatgctgccagaagaacagggccatcttctgcctcttcatgaggacagcccacaccatcagctcatggaacgggaatgggaagtggttgatctcagggtcatccaagtcaatgtccacctcttcttcacgcttcttagttgtctttcttcctctcctcaagggaatgtcatcctgcaattttagaggaacacatacaagctgagttgaaagtgaatcagattaattctttacatattttatgtagaccttccattggctcagctctcaatcacactgtaatgaatgaggccagttcttatcccaaagagactcacaagctccttcgggctaatttaaaaataagacttaataaatgtatacttaatgacccacatgtcagtttatgctttactttaaacaaaacaaaacaaaacgaaacaaaacattttctaagctgggcatggtggtgaatccctaaaatcccagcaacaccttggagtcagaaacaggaggatggagggttcgaggccaggctgggctacataatgaaagtctgtctcaaaaattccaaacatattttcataggccattctctttctttcttttttgtttgtttacttttgtctgtttctttttccataggtgtggctgtctatatctcatggtggacaacatcaccatgtttctttttcttatttttttctgaaaattcaaagatattctgtacttgtgttttcacataacaacaataaacaatgaaccaaaggtggaaacaaaactgctcaagtttttacatccctgctagatgcatctgtgaaattctttggatctattgttgtgggtaaatatttgtaattgattttgcctatggagtttatacactgttttcaagttagtatttatcctaggatttatttttgttttcccccagtgctaacataaattcattgtggaattttaaaagctactgtgagctgccaccgtggcacttggaaaatctttatttacttattttagaatcatgcactaagccttactactaaaatgaactcatatatctcttaaatatgtgagaaagagaataatcgacactaataatttgagcaacactaacctccattcccagcagtttcaaggctttgggctgtttaaaaaaatgttgtgaacaaagttagatctttttttcattgaggtaagaaacgaattctactatattgcaaataagtaatataagaactctacagtaccatatagcgttaattttatgtcactgagtaaacacaataaaaagagcatgtttgttttttaaaaaaaaattaggagaattggggatgttgtgattttggggaaccatagcgagttaggaaacggaagagatataattgaaggctcatgacttttgtgggtcaaagtttctttccctttcctatagccatcccacttgattggcacctccaggacatccagcacttgaatagatagaatggtctgaatgttttcctccccacccatcctcatcataggatgaaattctaactgagaaggtgttggtattggggtgggcatttgggggagactgactgttaggtcatgagagaaagctgaacacttatcaaaagtgggaactcatttttttttttttaaccacatgaagacacagccagaaagtgccacctgtgaagcagaaaacaggcactctgcatatacccagtctgctggtaccctgttcttgaacttagagctgtgagagatacatgttgatattgtttataagctccttaacctatggtattttgttccagcagtctgagcagggaagacagatgaaaaatgaaacaatcaaccgatcaaaccagatatttctcaaacctctggaaaacttctactatgcagagacttggtttacaatttaaaacgtttttttttagatgcttcctctgactgtcttccagtgcttcacagtagagcaagggtgtgtgggccagagcaggtgctgatggtggcataatttgctaagtgccatgggaaacatcatcacacagggaatgacttccttggccatgctgggaatatgtaaaatgggcacaactgaaggccactgagaaggccactctggagttatagaacttgctttgtgtttaagaacaggtgaaaaaattacacctgtaggccaggagtaccaattctgtattctaagtgcatcagagcagtgggtgtcacttgggaagctagctactggggacataagaattatgagctgacagttcctgcaaattaggatttttataattatataaattggagtagcttaaagctgtctccccactccccttttctcttttggcttctaaaatgaccacaaatctaaactttttttctttattcaaaacttttagttccccctctgctgattttctaatagccccacaaaaatactttcaccagtggaaaagtttgttaaaaacaaaacaaaacagcaaacaaacccccagaaaagcaaacagacaaacatagataaaataaagggaaaaatcatgaaacccaaacattaagaaaatcatgggcatttttaaaaagagagaataaacaaagaaatatcatgtccataaaccagcacagacagctgctctcaggatgtcattttggggttctaagggtcccccagctcctcagggagtgaagcccaggctatatttatagtaataacacgcctctgagattccactgtgttcttgaaagcaccagcagccaaagctgtaggggcctaagcttgataggaacaaatgcgatggagctgcttggctgctgtcctagatccggctgctgtcctagatccggctgctaggcataaaacgaaccaaccgaacacagacaaaccaaagaactgaccaacaaaaacacaaaacagcttcacttaagaatgtcctcaagaagtaaacattacagtcattggctaaagcgacccatgaggccacgttctagacatgccctattaccatcctggaggatataagaagtggaagttgtccctgcctggaccacttctgccacagactgacccattgattccctaggaaaagcgcaggtctttgatgggattgaatcgcagacataaaaacgcaaaatagaaaaaacaaaagcctgccccctccaatggaagatcatttttatttgaaggaaaatctagcagagagactgtagttatttaaactgcaacactagacagacatttttaggatggccaaagcgggtctgtcacctcaaagaaaacaacagatgatagaatttgtttggccagtgttttaaatttaataataaatttcagtagtttggatggaaaaagtgggaggtgtactttatgttttttcaatttgttttcccttagaaacagaagccatatcccaaatctctcgtccctagtcttccccaaacagattaagaacatgctagaagctcacccttttggggccaaacagattgtggtacagggtccggaagcgcttgcgtgtatagttgcagcgataagccccgcccatcaggtactcaatcaccaggccaatgtctatgaggctgattctgtagtccgggggcaggtttccctgttatggacgaagggaacaacagacaaacccaaaaagacggcgtggtttactaggggttcattggcaagtgttctgtaactattttagagtaaaaattataatgaaaaagaaacatgaatgtattattatgctggttaattaattcaccttaaaatagatccaaccgaaacctggatactctcgcttggaaagaagacataagttaaataagaagatgcggtaatcgccggcaataacagaaaatcaaattatttattcaagtcttcagctggggagaaaaaaacaccagtgtagcagaaagaaacacaggctagacaaggcaaggactatcattcccagcttctttctagatgcaggggcccctgatgctcctgagccccgctctgacccaggctgcctctcgaaggcccttcgttttctccccactcaccaaaggaagactcctctcagaagatgagtgtcactaccagggcgtggatcacttagagatgaattctacttgaacacaagacctctgtagtcacatacactggctcccctacccccagtaaataacggatcagggacagcatttcttagtgtcagaatagagctgtatgagtgtcccttgtgcttaaagggtgtgtgtgtgtgtctgtgtgtgtgtgtgtctgtgtgtgtgtgtttaagagtaacaggagaagaaatttttatcattggaattaaaactttcacaaatttaaggtggttttgtcaccttttgttgcaaaatagctttgattggttggggggggggcatagtgttaggatggagcccaggactttgtacatactaagtaggcatttttatatcgaggcacgtctctagccacagtagcatttcttaaagatccagaagtctggtgcatcttttggtttttattaattctttttgagtgctggttccagggctggaacacccggattgtttatagagatggttcaaaagaggactctttgagcccaaggagactctccactctgttaagtcaaggaagaagggattcgaagtgaatgaattccagaggtcatagatgactggcagctctcactgccttgcttgactccggatgcagggtagcatcctctgccagtgacggcttatatcacacacattgtgggcaattgggtgactatgtggtctggaccacatcctgtctcttccagtgtgttagatatctgtgtgcctcattgcttcctctgcgtggcttttgctgcaagcctggatttgtggaacctcttctctaccatctaaggttcaggtggcagtggaagtccacctagggatctcaagagtgtgacatgggaatctctgtcggtaggaaatccatttaattggctaaaggaggcttcattgtatactgtcattaaacctatagttttaaatttttcttgaaattttttatctttgaacttcctctgctttttatgacatatggggtgtggttggttcttgggatttttgctattgaaaatatgtatcagtgaaacaatgaaattaattgacatggctgggatccagcctgtttgtgtgtgtgtgtgtgtgtgtgtgtgtgtgtgtgtgtgtgtgtgtgtgtgtgttatgtgtgtgttttgttctcaggaacaaaattaagtagctacactctcttcatcattcctggttggggtaactgtgtcctgggtagactctaaaggaaatggcagccttgctgcatgatgaggatggtggccttgacttggtgaggtttacacacatcaatgacaaagcatctatattgcttatcctaggacatacgtgtagggcagaaggggagtttcaggtcttcatgctaaggaagaccagagaaatgagtccccagggcaaacagtactggctatgctctgttagtgcaaccccatgtgactctgcatccttttctatgtctcattttatgctctaaaatcaggcgaccttggccattgcttctcaggtcccacctgtttctagaagcccaactgttagtcagcacccatctactccacccattggtcagggacttttgtgcagagcactcagggttggtgtcccctgaagtttggtgtatggggttgggggtggtcacagaactgacgtggatggacctgtgctctcacttcgcctgctctggaggaggcagagaggatgtgtggcagcttgaatgccccacaggttgtgacaacagccttctggaggagccttcctttgctttggatctttccaaattggaattcaagataatgatactagagtcattcttattctgtctgctgttcctagtcctgtccccaccctgtgggtcatgacttcagtaacgggcaaagcctcaaggatgatggcccatttcatgccttaacaacacagggtaggtcccgagagtcaagtgacttagtagagaggatcgggaggcaggttgacaacttgaaaatgttgttttcatgctatgaaccgttacttgaaggtaaaatttaagtcatgccatgcttaaagatgtcctcgagagcagttcaaattcacaggttgaatctgctcttcaaaatgaactgtccttaggtgtcagctcatagtatggctgtccaatttgagctgtttaggaaccctgatttatttttttcctttgaaactcagaataagccttgaaaacaggcttgtttcctttggggtgtggaaagtcacaaatgattgctgattttcaggttcaccaaaggagagtgtgaaagagacttggggggcaggcttgatggggaaaaattgtcactgggtggggctcagtgtgggggagcactcgggaagaaaggaggttacccatggtttagtagactagcaaggtgaaaaaccaggcaattgattatttaaaaataagaatgctcctacaaatttgcatgaatttatcatatgggcttatgaaaatctcctttccttacccaaagtttcaaaaactcttctcttccctccatctcttccttccttcctccctcccttcctccttccctccctccatccctcctccctctatttcctcccctcttttgtattcagcaaaactgggtcttagttcccatgtaaatgaactttaaaccttaatttcaccctagcctatgtattctactcaaatcaccctcctgtggaggtgaacgacagcacagataatctgaagtattagcacatttaattgaagaaagagaaaccactgcttgaaacatccggagccacagattgagcagacagctactaaaacagcaggttatattttacagaagtgcagacagacttgagccactagtttaataggaaagccatgagtatagtcgatggatttatgcatgaaactgcttccccgaattggtttggcttatatcagttcaaacttctgctggatggagaatagcaattctttaccacactacttgtagcttgttctcaagatataaaataatttgagatcttggaagcatttttcttcactcatttctactggtttcaaaggccagcagggcttggagatgacctgattggcttatggtgatctgataattatgaaatgtatccttgggtttgtaggcatcatttacatttgatttagagacaattcagtaaatactgtgtttaaggtccagaactatgtttctaactcatgtacaaatctgtgtatatgtattatattacgactactggctacaactttcacagatatatatatatatatatatatatatatatatatcttattataagatatataagatatatatatcttattatattctttaattttaaagaatattacttattatattcttattattacttattatattctttaatattacttattatattttttaattttaaaaattaaatgtcccaagacattcttagcatttgaaacctagatttttgaatctcctgagtaagtacttcacctaaattagaaaaagtcatctgggaccatggaagaaatttgcacccacattttagtttctttcccttcacatctttgagaaacatacaacaaagagtcccattgtcagcccatttcacccgtgatcataaactgttgatacatctggttcctttgtgggtgagaaggctattccttcctttcctccaatagccagaggttccccttatcagggagacaagtcttcatttcctgtgcctactttttctaggagaagaaactaaacacaggcattgtctttgccctcctcttactagcagtctgctctctgagtaaaaagagaaactgtttctaggccagttcagtgctactctgggtgagttttaaagtcatcttcctcagttcctaagtcagcacgagtaaaagatcgttcatgaaactatcctcactctattattccggtcactcttaaaggcctgctgtgaggcctgccttccacattcttaacacccttttcttattaatttctatctctttcaaggcccattaccagctaagaagctttaacaaagggaagaaagtaccccaagggtaccttctaataaggctctcgatatgaacaaatgcaaaaggcagctcaaggaccttcagctaacggatagtggtcttgcaaagtggaaatctatggagaagagaggctaatatgagagatcttgataatttatactcatggaacttcaaaaatctacttgaaaatcaggcaagaccttactgccgggaaaagggggggtggcgggaaagtgagtgtgtgacttttccatttctgggttggctgagggctgggatctgggaccaaagcctagctacattatgagaaagctctacattctagctggacacagactatctgaggtgaggaaatgctgtcatatttagtattttataaatgtccaaaaataatttatcgaacatgagagtcaaagtttagcaaagaatatgttgattatgtgggaccctaatcacctgagattagttttcagaaaaatttaagtcaggataaattaagcaaaaggagaatgtgtgaaggaaatgggtttgcgggagaaacagatgccacattggcttgatataggccagactgaggaaagtcgggattttagtaaagtagtgatttgggtaaacaagccacccagggtctgcttctcttgatgtcaaaagctataggctatgctcacaaatctggacatctttcattattgtgtgtaaatggaaggaaggtttgttgtagtaaggaaaaaaaaaagcagtgtttttaggtggattcggattatgtttttgttcttacatcctttactcattcctaaggtccagcaggttaaaataggccaattataagcagctctcagggcctccagcactttgaagacaatattaagagttgcttacagttcactaagggtcgtctagttgggactttctatgaggtgatatatttgtccagttcttttcattctcagttgagactcaaaccagcccaggactttccccgaggccctgatgtatggagaaggaacttagttccttgtctaaaatcaagaacatgcttagcaagaccagaaatgacctggggccagcgctctgggagaactgaggtttctgatcctgggaaaaccccttcttaaaaagctgtggtgatcagtgaaggctgccaggacatggtgcatataaaggagcccctgttccctttgggcagcattgcttgatcagcttcttcctgactctgtcccattgtgggataggtttctgatgactctctcattgtttccccacacattgtatagaaggtgctggacttcacaataagcttgcttggcatttcacagagcttgatcccaactttcctagcttctttattttccgatcctatggtacaccctctctggaacctgccactgagtatcaagctgctcgtccaggtcatttctctacgtatgtccttgcgttcttgtgtagtactgtggcattcctatgaggtagggaaggtctacaatttctcttttgttctttggagttaaaggttctgaagtcaagctactcttaaaagagactgttcggggcaaaggagcaagtatgtctaaggttaaacataaccttcctatgttcaacttaaatgagaatattatacaacagtaataaagacattataatcctacttcggacatttttatgcaaagtaaatgaattcaggtgtgtagacagcctatgcaatactgtgtgcccatcaccaggaagcctcagccattgctgctttccttgataaaagatctgtggcaatgttagcatgttactaatcactgaatatactcatcacatccttacccttcaacctcttccataaattgtgaattacccatcagatttgaaaaaataaaatgaatagatgggcataaaaatatattttggaaaaataaagtgttaggatggaatgcatagtggaaccccctttgtttagcttctgactgtactttatatgaaggtagacaggatattgtgaggagctggcaggaaggcacttcatgtggtcagctaccatggaaactaactccccaactgtaaggggcatttggaaagacataaataatgacataaatccacgttggcatgagggaaagcctagaatctgctatagaaaagcattacattcaatgaaagcttctaaatccatggcaaccggaggaaggaccatagcagcattgtcagcagaactgtccaagctacaaagcagatgcacatacaccactctgcaactatggggggctggcagggacatggagactgggcagctcatgcataacaggtacagtctatcacaggaagcactcagggcaggacctctgacctgtggtctagaggattcttacctttttgacatccctgaccaagtggtacaatgtatttgagggcccatgtctctgaaaatgataaagaacaatcaaacagttttgcttgtcaggggctccaggtggtgaggcatgagggagctggaaggaagggttttggctggtggagggcagcagctctttgtgctgggccttgttctagttgctcagttgtatctgtcactttgaaaccaagactggctggattttggatcacagaaaaatgtgtttgaagttgtaggttcaagcattgtaagactgattgtcaactaagagataacagggccaaatggtataggaagaactagttttacagcaagacaaagcacaggggttgtgacacattgccatagaaacttcttaatttaatgcaatgtagttttccaagttgtcatcaaaaacttgtttcaaaaaagcattggccaactttctctgaaaaaggccagaaagtcagtagtgaatgcttgtagactatacagtctttctcaagtctgtttagctgttattactgtatgaaagcagctacaggatatacataaataagtgatcttggctatgtttcaataaaactttattcatagtcacagaaaatcaaatttcatatactgtttttaggagagggttttgctgtataatcccagctggcctcaaaccacaggcctcctgcctcagcattctgagttctgggattatacacagctgctatgctacctggccagatttcataaatttaaacatgtcatagagtattgtggcttcctttgtttgtttcaaccattaaataaaaaaagtcatccttggctcccaggatgtacagaaatagtggactggctttatatcttggtgataactccctgacatctgacttaagatagccagggaaaaagaggtcatgaaagggtatgcatttattgaggcttagaataaagtagatggtttgttattccatggtctcttaggagtagggatgctgagcaaagtacagaatacctaatctaatttgaatttcagatgagcaatgatgcctcatgcaatattaggaatatatagtcagccctccacactcatgatgtctgtattttcgaagtcctccaactggattgaaactatttgggggaaattatgtgcgtattgaagatgtacaggtatttttcttagtattctttagaacagtggttctcaacttccctaatgctgtgaccctttaatacagttcttcatgtgtggtgactccaaaccataaaattattttgttgctactttataactgtaatttcactactgtaattattcataatgtaaatatctgatatgcaacccttataggggtcatgacccacaggttgagaaacactgccttagaaaatacaggctaataactatgtaccttgaattgggtattatatatgagagtggaaagttcctagtttagctgctttattatttagcttccagaaagaggttacttaaaaaatatgtaggatgatgtatgtaaagtctgtgcaaatctgatgtcatttagatgaggaagttgagcatcccaaggtatttttttcttttgtggtaactcctagaatgaatcctatgaagatatgaagaacaaccatatttatgctaagagtcattgcttatctgaaacccaaatgttgctggtgtgctgcagttatttgctagatctggcaacatgattggaagttctaaaacagtggtgatgactggggctgaggttcttgaccctaaccctgactgtgcatataggcatcacagagtttgctgtgatgcagtctcttctctttacaatgaagagaataacaccacttcatctgatagggctatctgaggactaaatgatgcaattcttcttcttcttcttcttcttcttcttcttcttcttcttcttcttcttcttcttcttcgtttttttttttttttttttttttttttttttggtttttcgagacagggtttctctgtgtagctttggagcctatcctggcactcgatctggagaccaggctggcctcgaactcacagagatctgcctgcctctgcctcccgagtgctgggattaaaggtgtgtgccaccaacgcccagcctgatgcaatacttctttataagctattaaatagtgcttggaattcaataagtgatagaaatcattattattgttgtttccatttgctgcctcataatttttctcaatatagtactgccagttgatcggagcaatgaagcctattggtctaaggtccaggaacagggttctttcgttctgtcttttttaggatttggaatgaacctttccaccaccattactctctgatacctaagtcatgatgccaaagtgtactatttctcattgtaaatctcagcgtgttgaggtaaggcacatctgcagagaaagcagaaacctggatctactcggccagctggcttccttcctctggtggggttgagatgaagaatgatgctattatctatcacctacctcttattgagggacagtccatagctctgtcccattgcactcacagtggtgggacaaacattgtggccagtacatggaaaggaaacttctgagaagaagcttgagtttggtaccaagttctttttgttgttgttcagagatttaggaccttcaataaactactttttagcccctgtctatgttttacacctctgtgactctacattattcatgttgagcttcatgtcaatacagaggtggggctgttaggtgatggtcacaagggtttgtaagtggaattgaggtatagacaggagagggttcacactttcatacttccaacctttctgccttaagaggacagtgtttgtcccttgcagtggacacattctgggatgagagaatggctctcactacataatgaacctactggccccttgatcttgacttctaaccttccgcactgtgagaaaaaaatatacgttcttcataaatattacccagcctcaggtattctgttgtagcagcacaaatagactaagaccacctcagttttctcatccgtgaaatggtaaaaaacagcatcagttctttaaacttggttggctttttttggtgaatgctgctgcaaagaacaaccaccaccacgaaacatgtttggacgactccaagatattgtatactgtcatgggaaaaatgaacttcattgctctgaggatgaaaaaaaatgatacgtgatacttaatcagcctgctttggtgcttggtgctaaaccaagcctcctctgtaatatttgtctcaaacacccccaggcttacacagtacatgtgttctgattgacagagactcgctggtggttttgtgttagaatctgagaacaaggccctcgggtgatcacatccccttctgtctaagatgctgacaactgagcagttaaaacaagtgaagtcctggtgacttggtgtctgttggctattcacttgtgagggagtgcatgtgaggagtaatccatgcattacaggagagacaggagaagaaccgcaggcatgggggcaaggcaggagaaggtaaacacagagaagaaaaacagaggctggaaggcatcttagcttggccctaccgtgttgtacagttcctctagtctggagatggtgagaaaacggtgcatgcttactccattctctatgagcaatttcacaaaatccactctgtccagaaccagggcatccagcatggcttgctccagagaccctacctgcaattcaaggcattcagtcagtctgcccccagcagagaaacgcacttcttcagtgctcacccagagggcttgaaacagattggggacatgcgtaaatctccagatgtaccctagagacccagtacctcgccctccccatcccccttcacgtgctactcctggtccctaggctcatgtcttgggaaacagacgtcaaggacttccggatctagaagctgcctccacccccttttatgttgtggagccttgggaccccaggttttcctcccgacaattgattccctggctagttttctgcaatgcctgtaaaggtaatgctagacacttccctcccttcgttttcttcttccttagggtctgaatgagagccctggctgactcgaggataggaacccaggtaaacagatccgagggtccagtaggcttggaatctgtgtagaaataaacaccccagaggcaaactggggccacttaactaaaagaacaacatattttctagatggagaactggctgggatttatattccttttacagttttcagttttttcaacgtccagaccccttaacaaatacatccccaactagcaatctctgaaccctaagaagacaggtgctcagttgtggccagacctcctggggctggaaggttcggggagccttagttccagggtgctgctgggctgccaccagtgggtgtgtgcacacatcacccaatggcccatttcccaagttcttattttcggcagccaagcgacaggaaaaagccacggatagttacataaagcttttgttcacttgtgcccggcatagggcagacctgtgctctgccaccaggaccagatggtacctgcacacagaggcctggcccagttgcaaatcagcatgaacgccaccatttggcggcagcagcttcctccttctgctctgctctcctaaaagataaccataaacacacgaatcctctcctatctttattttaacgttgtcttatctgtatctttaaagatagaataaaaagataggttttgcacccgaaaattgctgagaagagccagggaatgtttggtggtgggcttagttatatcttccactaggtggcagtatgtccccaaacacgagaagggcgcccaggccacaggcagtgagtgctaagcaaagggtgatctctcctccccctcccacccgccccaattttctaagcctctttcataggttccttaaacaccattgccaagcacgtgagcttttgatgggtaacgatgtatactctaccggccactgttgcccgtaaataaagatctggctgcgagcgatgtcaactctgttccaagctaaagctaagctcagttggtctggggccgatgcattggctcctgtacaaagcgggagaaaaaaagaaaaaaagagggtgagagaaacagtggtaagtcatgccaagaagagtctctcagccactcctccatcgatccctcttccccaagggcaaactaaggagcggtgtgactccattctactactgagcattttagggaggatccttctttgcagatctattttattattttatttatttatttgagataagctctctatatgtagccctacctagccttaaactcatgggtactcccagcttggcttcctgggatagcaggtgagtgtctgccattggttgcatttcagtactcagcagccacctgtgtcatttgtatctctacagaagattttgctgtgataggcagtctagatgaagcatgctgtccacacatgagggcagcagctgtttgtgtagctgagaacaggagcaggttagaaggcagtgggtgtgtcttgcaaaccctgtccaccttgtggctgggtgagcaggggcctctgtaaatcagtcttctgtcaactctgaaatgggaacagtaagaattatttttattctattcaatcgagaggctgtgagactgaaatgggttcatataagtgaatccacatgccaacaggttttttatttttcacacattattgatatccttggtatacagaggaagagatctcactgcatgctggttcattgttactctatcgggtcacctattggcaggggagaaggggaaagagcaaacagtctcctttggctgggagaacttgaaaattgagcttatgtttgacaaactattagggatttccacatgttgtgacaaggaatgtcccaagtaattctgagcatagctatctcttgctatctgcattggacccatgaggatactcaagtctagacatgcctgagggacaggtcacacggctcctaacagagaataaacagaagcattcattatggagcagtgacattccacccagagtcagtccttgtgaattctgcccagcagggaaggttagaatcaataaggatccacttcctgctcaccacactatgagtgtatgcgactctcactgttgccacttgtctgcattactagaagatctttacattatcactacgccatcccccatgccaatgcagtgacattgcttaaagggctatttaaagctcctgagtgtttccagtgggacagagaactagtggcccatatgtctcttttcatgcctactccacgcctttttcttctggactctgcaatattgatggtatgaattaggcaaatgggactggggagatgtaaagtgcttgctaaataagcacagggacctgagcttcatgcccagaaaggacataaaaactgggcatggtggtttgtgcctatagtctagtgttggagcagtggggtgacagagactggaggattttgggggcgtgctggccagcgagtctagctgaactgatgctccaggttcagtgagccattgtctcacagtaaggactagaggaagatgatggagagaactagaggaagatacatgatgctgacctctggcttgcacatgaacacacatacacacatgtatgtacaacacacacacacacacacacacacacacacacacacacacacacacacacgtgcatgcacannnnnnnnnnnnnnnnnnnnnnnnnnnnnnnnnnnnnnnnnnnnnnnnnnnnnnnnnnnnnnnnnnnnnnnnnnnnnnnnnnnnnnnnnnacacacagaggtgggggggagactcaggcaacctctagacatggtggctcttgagaggctgggacagaaatgatgtaataagttctagaccagcctaggctataggatgagcctcatcttgaaaccaaacaaacaaatggggctagagagatgactcagcaaaggacctgggttcaattcccagcaccttatggcagcttacaactgcctgtaactacctccaggggattcgacaccctcacacagacaaacatgcaggcaaaacaccaatgtacataaaaataaaaataaaccagctattgaaaacaaacaaaaacaaataaacaaaccaaagtgatctgtgcagacagtgtccagcagaggactgctttcagtacttttccagttgttgcatgcatgtctagtctggcatgcccctgcagaacctgtgtctcacctccacaatttgactcaggagttcaggggttaagtctggggttttgcatttcttttttctttttgtgatagaggagactgaacccttcctaggcaagtgctccacactgaggtacatcccagccctgattctgtgcatttctgtcagcctctcaggaaatgctgctgttcctgtcctgggaactaccccttgagcgacagattccttgagagctttgggatgtactcccttcacaagtctgaccctggtgtcacaagttgatgggtttagtgtatgccacattcttgggagtgaaatgagtaccttttgaaataatgtctattaatttgatttacacagagaattttccactaggaaaatcatttatttttttcagatgacaaccaggattgcaaactcatgctaaggtaactgaaatatgtgaaaatgtatgttactatcttgtagaggaaaaaaaaaagttgtagggttcactgggatttcatttggaaggtggcattttatttatttattggtttttcgagatggtttttccgtgtagctttggagcctatcctggcactcgctctggagagcaggctggcctcaaactcacagagatccacctgcctctgcctcccgagtgctgggattaaaggagtgtgccaccaatgcccagcgaaggtggcattttataattgcttcttatttttccctcttttaaaagtacattttaaaaattttaatggacacagtgagtgtatttttatggactattgtgtgacatatagacatatggaccctgtctatccagataagattagatggagaacatcagagaacatttgtgtgtgtgcattgagaccattcaaaatcccctctattgtctattttcaataatgcagtcagttgtaagctctagttttcctacagcgctatagcacagtcactgcttttagcaggctgtacctgtgagtacattaaagacccctgctcccttcttctctcccactgtctatctctccacttctgtgatatcaatgttcagtttcccaatctaagaggaacttgcagtatttgccgtggtgagcttgatttttttttttttaacttagcacagtgtcctccattttcatctgtgttgctgcaaatggcatatttttccataggcgtaatatttcgcattctgtataaacacaccacattttgtttagccatttgtctggtgacagacatctgaatttagtccatatcctgagtattgtgaagttgctgcaacaaacacaagagtataggtatttctttgctgtactgatttcatttctttttgagctacacctggtcattggatagctacatcacacagtaggtctggtcttagctttccgaagagcctaacttccatacagttttctctaagatttatttattttgttttatgtgtatgagtgttttgcctacatgtatgtatatataccacgttcttgcctggtgcctgtggaggtcaaaagagggtaccaggtcccttagaactggagttatagagggttgtgagccaccatgctgggaattgaccctttgtcctctacaagagcagcaagtgctctgaatggctgactcatctttcagcatcatctgcactgtttcttttctctttaaataatggttatatagatttaatttttatctgagggagagagagagatgtacagagagagggagggaggagagagagggagacacacaaagagggagagagggatgggagagagagagagagaaagagagagagaaagagagagagagagagaggactcagtttgtttctcttagttggtcccttggttgttgcttacatactgtgatggtttagttattccctgcatcatttatatgtcacaaatgtgtatgctacccaagtcaagagtagcacaagcttgagcaagagaccatggaggaagaggtcaaggtgagctacagccctgaatgtaattaggtaaatgtcaaaacatgaagccaatgaactttggcttttcaaaacatggtatgtactcactcatatatggattttagatatagagtaaaggattatcagcctgcaattctcactgatagagaggctgggaaacagggaggaccctaagagagacatacatggtcccccaaagagggggaaagggacaagatctcctgagcaaattgggagcatggggggaggggagagggagctatgagaaagacaatgggagaagaggaggggagaggaagatatgagggagcaggaagattgagtcaggggaagaatagaggagagcaagaaatgagataccataatagagggacccattataggtttaaagagaaatcaggcactaaggaaatgtccagagatctacaaggatgacaccaactaacaatctaagcaatagtggggaggctaccttaaatgcccttcccctataatgagattgatgacaaccttaaatgccatcatacagccttcacccagtaactaatggaagcagacacagacacccacagctaaacactgagctgaactcctgaatccagttgcagagagggaggagtgttgagcaaaggggtcaagaccaggctggagaaacccacagaaacagctgacctgaacaagagggagctcatggaccccagagtgatagctgggaaatcagcatcggactgatccagacaccctgaatgtgggtgtcggttaggaggactgggcagtccatggggcctctggtagtggaacagtatttatccctaatatatgaatggactatgggagcccgttccacgtagagggatattctatcagcctagacacatggggaagggactaggccctgttccaaatgatatgacagactttgaagatcccccatggaaggcctcaccctccctggggaacagaaaggggataggatgggggttggtggggggtagggaagggagagggaactggggttgacatgtaaaacaagcttgttcctaatttaaataaaaaataaaaaaattgaaaatacatcattcaagaattgtcctaggtgacagtttgaatcagcacaagtgatgaaccaccctgggttgtttaggacagtgacagttttagcactgaaattccttcattcagggagatgcttaagtcatgagtaaggctgaacagcagctcacactgtccttaattggcggtacactggaatttcctgcagaaatttaatacactcttgcctcagattcattcctagagatcctggttaatctggttttaggcactgtgaggtctaaaaagctccccaggtgatttatatgggaagacaaggttgactctccagtgcaggtaatatacactgattaatttgctcacttttcactcacgtattttttgcattcaaatatattgattccatgcctcctcagatgctagacattatgccaatatggacaccaaaatgaatcagacagattcctttgtcttcggaccttacagtctggagaggattcttgtttaacatcccagccactcaatttacctgctcaatatgtatgtgttgaagacatttgttttcaggaactgtttggatattgcacagctaatggtgatcagcaaagctgcagtcactctcttaatggaggttgcagtgtcctagtcatggtgggtgaacgttcagaaaacaagcaaacaagcacacagtgaaccttcagagtgtgcatttgtgctatagatgatcagtgccaccgctagtatatttgtggcctgtacctatataaacaaatgattgtgtcaccactgatctggcttcccagtcttgcttgttgccatgacaatattgtaccaattagctggagcaatccattggcagactatcctcaataattagggctggaaactgtgtctttgagtagcctggaaggcacaagtatttgagttcttggctttctggttgactctacatggaaaataggggattgggaaaaaaaaaaaaacaccttgaggaattgaaataggtctggattctatataggtcctgacttgagctcagggcactcacctatataatcggcttcctggactggtagatgaggaaagctgcttggtacctttgaggaaaagcctttgtaagcatgtatacagggtgaggacgagtgacagagtgtcagaggtatatggatgagtaggcaggatgcatatgaaatcatccagaaggagaaagggtcaactacactgccccagtgtgaacacggttacacatcagtataaaatgtcagcagtggtttggttatcttatctttctgcagtaggatggtaaagtaattgcacaaattatgaccacatagagttctgaaggatggattactagacatttcagtaaaggaatgacgtatgaggaggagagggattccgcacacttcatctactgttgtatttcagagttcagagcagtaagtggtatgtaaaaggaatgccatagtctttttgtgttaaaagacgatgctagaaaatggcagctcacaaagaacagaaatttatttttgacagtcaggaggcctgaagagccaagattaaagggccagcaggtttgatgtctggtgcatgtccacagtgcttcacccgtgtccccagagtaggaatagtcaaagggtggatgcagttctacagcatgaggacagtgatgctggcaactgagatggcctaagtggccttcacacatgcttctttgaagtgaaacaagaaattacctggtttaaacaggacagaaaaaaaatatgtggcaaagttgaaataggacagaaaaaattatgtggcaaatttgctaagatccacaggaagaataagcattctctatgacagtgttaaagaaagtgtgttactacaaatgtgacagccacagtgtgtgctaagtgtttacacctttgccctcttcacctacttacataaggatagcatcatcttacatcacaatggggatgagcacaatgcaggaaaatacagttctgtacatatacatgcttatagtcttcatgctttcatgatggtggtggtggtggtggtggtggtggtggtggttgtgtctctctctctctctctctctctctctctctctctctctctgtgtgtgtgtgtgtgtgtgtgtgtgtgtgtgtgtgtgtgtgtgcctgtttgtgtctgtgaatgtgggcatgcaagtggaggctggagaataatgttgagtgtcagtcctcaccttccacactgtttgagacagtgtcttctctgctgaatacagcaaactaggtggcctatgcatttccaggctgctgggctgcagctgtgcatgctgccacatcgggctttgtgtgggttcagggaccggaagtcaactcctcacacctatacagagaattctttccccacatagccaccttcttagccccagccaagttattttgagagaccatacccatataacttctattataggatactgttataagtatccagctttatcagttgttgtgcatattaaaatttacattggtatatatgtatgtacgtattatgtatgtatctatgtatgtatgcatgtgtgtatgtatgtaaagacacacaatggatatggactctgttacatctgtggtttcaggcatgtgctgggggtcttggaatgtgccctcacagatgaacgccagctactgtattcaaagttcatctttttcccagaaacattattataaagaatatgattcttctgttaatacattttgctcttttgttattttccttagactatctctgtgtgcagtctatgctaatccatttttattatttatcatttaatgagttgggttataatgggcccagggtagcattccaagctagttattattcacaactggaaggctttcttctaagccatgccaaaatcaaactccctcctgcaagcatggcttatccacataattctgcatgcatcccacctcctctatctctatgctctgagccggggcgagggaggattcccaactgtgtaccacacttgttcttgcacaatgctgtagacaaaggagagagtgctgcatcctggggtgctcctcaaactaggaatagactctgaaggtgctctgctgatgccctttctctcatactctgccctattctccaacatggtttctgcatgcacagatattttggagtatatttcttagtttcaccaaaatggagttgtgcttgtttttccttggttttggtcagttgattttggacattttctaggatagggaggggagaatggtgagtttatatggttacatctgtgttggcaattggaaagttacatagatgagagagtttcttaaccaggggtcttcacagagtagcacagctccaactgaaggataaaagaccgacgggcaggaacacgcttagccagaagcaggaggctcctttaagaggttgatgtattcaatcaaatcaagagtctaaaagggggaagggtaaccaaaactaaggatatataaaaagccatatggaaacctgtaaaaatataatctaaagccaggcagtggtggtgaatgccttaaatcctagcacttgggaggcagaggcaggtgaatctctgtgagttcaaggccagcctggtttacacaaatcttaaaacaagagtttgaacaaagatgtcgctcatggatggacaaagctcctactagaagtcatgatttattaaatgaaaaatcccagtattgggatttttcctaaaaatggttggccagggaggccccggaggccccggaggcccctgaaatagtacaggttactgtcattgttcttgattgtccaccagagctttatgacaagaccctactgctggaaatagatactgcacactagatcacatgacagagaaataaagccagggggagtgtgaggagagaaaagtcatcaatagccttttacccagctgtgagtcctgcgagctacaataacaacatgtgcctcgagcataacagaggcacggctgttatagggataaccactacttcatggttggatttagggcttgcgccacaagaggaaatccatgcctggctctgtaaacctcatcaagactccatggctggggaggtcataggccctagacagaaacctactacttctgtttatggttgtgcaatcaaactgccttccaaaaacttatatttattcccatggatcggtgcttgctgctgtaggcagcaattaatgcagaaactcataactggctataatatcagagaaacacaatggtgcaatgtttggccctaaatgtggcagctagaccaacctctctaaggctcagggaactctgaggaggagggggctgaaaatagaagagccagagggtggtaaaatgcgaagcaaaaggatatcttcaggttatgaactcactacagctgtggttatctgcaaagaacaagcttgagcctgacaacattgcatcatgggtgggggaggggctcgtgaggtcccatccctcccccaaactatttattaatgattgttgagggaggggtgtcattgtcttcagtggtgtacccactgatatgttgcccttcagaaaatactgccccccccaccgcattttggatagtagctaatcaaacagtgggctacaaaaaggagacatgaaagtatgaggggacttgatgagaaggagggggttagtgagagtgggaggacatcagagagaggagtgggggaaggaaaacttctacaactcattatatgaatgtatgaaagtgtaaatcaaacaaaatattttgacatagtactgaggggtgaataaccaaaaatttagtatatacatgtaagaaaatttctttttgttttcaaaaatggttttattcattttacatatcaaccccagttccctctctctgccttccccctgcctcttcccactggctcctcagagagggtaaggcctcccatggggaatcaacaaagcctggtacatcaagttgaggcagaaccaagcccctccctgctgtatcaaggctgagcaaggtatcccaccttagggaatgggctccaaaaagccagttcatgcaccagggataaatcctggtcccactgccaggggagccacaaaaagaccaagccacaaaattgtcacccacattcagagtgcctgatgcgtccatgcaggctcctcaactgtcagtccagagtccttaagctctcactcgcttgggtcagctgtctctgtgggtttccccatcatgatcttgaccctccttgctcatacaatccatttcaaagaaataaaaaaaattctgaaggcttggggtgctaagcaaataatggaccctcctggagagtgatgatacacaaaaaagtcaggtgtctcattcggcatacattgtgttaatataatcctgcttgatggcctacagtgggatgggcagcatgtactgatggctgtcattcataatagtatcatgcctctggtgttgaggatgaagcacccatcccccaaataatgttaaggaacactttttttcttgttgagggacatgaacccttccttaaagaattttatctggattaaatgtgttttgtagccaggtgtggtggctcatgcctttaatactagcctttgtgcagcagaggcaggtgaatctctgtgagttcaaggccatcctgctctatgcagtgagattcaggacacccagggctacatagggaaccttgtcttagtgtgtatgtatttcctgattctgtgtgctggtgcagtcaggttgatgtagttctccttgcattgaagaagctcttctttgtggaagatagagaccattacagaaagccacaactggctcaaatgtagataacaactgactatgtggttctcaaccttcagctggtccacctgcatcacaacccctgttcctaaagtgcagggaacatcatgggagagaggacagaaggattgtaagaatcagaggaccaggtatcctattgtggggttgtgtcttctagatgtgacagggaagccacacccatgaaatttcaacaatatagatgcctgaacaatgacaacaccaactgacatgctaatgtggatgggggaatcacatagggcccccaaccctagataaagagctacacgcaattaatgactactgagagatggaaaatgaaagtcttccccagggatgagccctctaactggctatccaataccaagtggtcagccctaaaaccaggtggtcagccctaaaaccatagataccaccaacaccaaatagacttagcaggttgtatttacacacacacacacacacacacacacacacacacacacacacacacacacgtatctataccatttaaagaatgagaggctatgaatttgggagggagcaggatggggcttgggaacatgagaaggtttgggaaggagagagaaagggtcaggggtattttaactaaaaatgttttctatagtttcatccagcatcccttttattttgtttagaaatgttgcaatagggtctcagtcaacacaaatccatctgtcttttcattaaaagacatcagattccctaactacctttagatcagtaatatgggaggaaactagctgcaaggccctatcacatgacttaggttgctaggatacaccttcagtcctctccccaagtggagattactgctcaggatcctccctcaagaatgtggctgctacatggagaaagattgaattcaaagctggaaacacacacacacacacacacacacacacacacacacacacacacacacacacacaggatggggtttatatataatttattgtcctctatattttattgccttgaatgataactatcttctcttggtaaaaataactttaagtgaatctcaggggaaggctaaatgggatcaggaaagaccaattcagttttagctgaagaaatctcatttttatatgtgagagacaaaacatagctacctgaaggaagagagggtaacttccttgggttccagtaaataagaaagatgaagctagcatttattttatgttaagtttagacctacaacagccagcacagtttctgagaattcatgcattgtattctcacaatcactcacaaggtgccattgctccagcactacagataaggggatccaggcacagaaacttgtctatgttgaagcagtcaggaaatgtcagaggtgagactcaaacacaggcagcctgcttgtgcagtttcccccatcaccaattatgttttgagttagggttccactgtgaagacaagactggcctcaaacttgagagtctcccacctctatcttctgagtattgggctacagcccggtcaccacattggcttcccactgaatttttacttcatttcctgcctgggcagttgagacatggaacaggggatcattcagggatgagacctggatttctagctggttttatttactcaagaaatttttactgagccttagttctctttcagccttttttttgtagatgccagtgaaagaggttgaaccttcaatggagagagccccctaaatatttacatatatatttcttctttttcctttgggtttaagtagagggtttctcatttggatgagtcctttgaaggaccatttcatatctatgatactttctggtggctttaaataaacctagcattcatttcctttgaaataccaaatactggttctaaatggtttccacccatccctaccagctctattcatttcaatcactctgtcttgactgccattcctccctagtcatcataaatacagctcccagtttaaatcatcatgcagtaaagatgactacatacaaaccagcaatttaggtaatacttattttataaaataattctttataatatatttacctttctctctagattggaatttatacagagatataaataagatggcaggagtgcaaacttgtacaaccactttggaaatcagtatggcggtttctcaggaaaatgggaatcagtctacctcaagatccagcaattcctctcttgggcatatacccaaagaatgcacattcatacaataaggacatatgttcaactatgttcatagcagcattatttgtaatagccagaatctggaagcaacctagatgcccctaaactgaagaatggatagagaaaatgtggtacatttacacaatggagtactactcagaagaaaaaaaaatgaaatcttgaaatttgcaggcaattggatggaactagaagaaaccatcctgagtgaggtaacccagtcacaaaaagacaaacatggtatgtactcactcatatatgatttttagacacagagcaaaggatttccagtctacaatccacactgccagaggagctaggaaacaaggaggaccccaagagaagattgcatagtccctcgaagaaggggaggaggacaagaacccctgaacaaagtgggagcacggggcatgggtggagaggaaggagatgggaagggaagaaggggaggagaacaagaggactgagtcaggggaggaatagaggagggcaagaaaggagatgccttgatagagggagacagtataggtttggagagaggttggcacaagggaaatgttaggggatccacaggcatgaccccaactaagaatccaagctgtgatggagaaaatgccattgatggccttcccctataatgattgttgtctaccttggttaccattcctagagccttcatccagtagctgttcgaagcggaaataggcacccatagctaagcactgaaccatactactggaattcagttgtggagatggaggagggttgaacaaaggagccaagacagggctggagagacctgtagaaatagtggacctgacctagtgcgagcatggagaccctagtcataaagctggggaaacagcattggaccgaaccaagccctctgaatgtgggtgccagctaggaggccaggacaatctatgggtcctctggtagtggaacagtatttatccctagtatacaaatggactttgggctgggcattggtggcacatacctttaatcccagcacttgggaggcagagacaggtggatctctgtgagttcaaggccagcctggtctccagagtgagtgccaggataggctccaaagctacacagagaaaccctgtctcgaaaaaaaaaaaaaaaaaaaccaaaaaaacaaatggactttgggagcccattccacatagagggatgctctctcagcctagacacattggggagggtctaagccctactcctccctctctgcaactggattcaggagttcagctcagtgtttagttgtgggtgtctgcttctgcttccatcagttactgggtgaaggctgtatgatggcatttaaggtagtcatcaatctcatgataggggaaaggcatttaaggtagcctccccactattgcttagattgttagtaggggtcatccttgtagatctctggacatttccctagtgcctgatttctctttaaacctataatggtccctctataataacatttcttttcttgctctcctctattcttgccctgactcaatcttcctgttccctcatgtcctcctctcccctcctcttctccccttctctttctcctaactccctctaccttccccacatgctcccaatttgctcaggagatcatgtcccttttcccctcttcaggggaccacgtttgtgtctcttagggtccttcttgtttcctagcttctctggcagtatggattgtaggctgataatcctttgctctgtgtttaaaatccatatatgagtgagtacataccatgtttgtctttttgtgactgggttacctcacttgggatggtatcttctagttccatccatttgcctgtgaatttcaagattccagatgggtatttcttacaacagttttggtccctgacatagcaagtgagcagcaaatatacttatggcctgtaacttctttggctcaaggagaatgaacactgagctgatttattatccatggtactttggaagtgttttagctcccagggacttagttctttacatgtaaagccaatatctgacttaaaagatggtttctgcagattaaatgtgccaatgaatagaaaatgatgatttgccaaagcattatgccagacaggattttaaaaaatcaggaaccatctattttctgtccccaagaaacacatcttaccaccaaaggcagacactatctctgaatgaaaggatggaaaaaaatgttccaagtaagcagaccaggaagcaagcaggtaaaactattctaacacctgaaaaaataagctttaattcaaaactggaaagaaaagataaggaggggtactacataacaattaattgaaatatccattaaaaggacattactatttaaacatacacacacacacacacacacacacacacacacacacacacacactgaacataggtgtgcccaattatataaaatgaatactaacagatgtaagtcacagattaaccctagtacagtatagtggacacttcagtatctcattctgatcagtcaataggtcttcccaacaaaagttaaacaagaaaatatatgaattatatgacaccataagtaaaattgatataaaagactctacagaacacactgctcaaatgttgtagaatacatgttttcctgagcagcccatggaacattttttgttttgttttgtttttaataaatcacattgccttcacatttaaagcatctctgaataatcccctttaaaggcaatacttcaagatgaagtgtcccatgggaaaatactggggacatgagagagcatggaatttaaatattaaatactaacatacatatccatagcacgtgaatagatgttttgaaataatggcatggatcacatgttgaccattgctgcttgacaaagttcaagcatgtcaacatcgcagagaaaccacccttctccagcacctgcagaggcaggaagatctctgtgagctgcaggtcagactggcagaatgagtccatggaacattttttacaataggtcatatatcagcatatgcaagtctcgacaaatataggaaagctgaaatagttactttcattctatctgaccacaaggggaaaaaaaacctagaaatcactagcaaaagaaaccctagaacacatacaaacccatggagatcaaacaacactactgagtgatgcatgggtccttgaataaattaggaaggaagtaaaagaatttctagagtcaaatgagaataaaaacagcatatcaaaacatgagacacaatgaaagcactcctaagagtggaatttatagctataagtgtctacattaagataccagaaagatctcaaataaataatccaatgatacatcttaagtctctagaaaactcaggtcagtagatataaagaaatcctgaaatcaaagcaggaattaatgaaatagaaacaaggtagtaaatacagaaaatacaaagaatcaaataaagagctgtttctttgaaaagctaaacaagactgacaaacccttacagtaaagagaagatgcaaattaacataattagagatgaaaagggaaccattacaatagataccaaggaaattcagaaaatctaaagaacatactctactaaagtagaaaatttaaaagaaattgatgaatttctgaatatacattaccaactaaaattaaacaaaaatgagatgatatatgcagattttatttatttatattctgtatgtatgagtattttgtttgtatgtatttttgaatcacatatggcagtgctaatggaagccagaataaagcattgaaaccccaagaactagagttacagatggctgtgagtcatctcgcaggtactgagaacctaatgcaggttccctggaaaagcatcaagtgttcttaggcactaagcaatctcttcagctctgagataaacaatgtaaacagatccataacaaacagttaagattgaggttatacctgggagtggtggcatatacctttaatcctagcacttgggaggcagaatcaggcagatctctgagtttgaggctagcctggtctacaaagagagtttcaggacagccagcactgttacacagagaaaccatcatcaaaagtgaaacaaaacaagggaacaaattgaagaagtaattaaaaagcttcctaataaaaaagtcaaggctcaaatggattcactggtgaattttttccagatcataatggaattcttagctgtagtagtaagacgaaggaagtcgataaaaagatgtaatcaggaagtgaagaaatgaaggtgtctatttacacatatgattctatacataagagactctaaaagtctgttgggcaactcttagaactgaattgatgaacagttttagcaaggtggcaggatacaaaattaatatacaaaacccagtagattgcttatatgtcagtgcaaacatactgagaaagaagccaaggtaacaattccattcagtagcttcaaaacacatacctcagaataaatcaaagatgtaaagaccaataagctaagaatgtgaaatacatcctccacaacaaaaacttaaaggcaggaaaaagaaattgaggaagactctagaagatggaaagacctccctgctcatggatcaaaagaatcaatgttgggaaaatggctatcctatcaaaagcaacccatagattctatgcaatcattgtaggaagccggttcctgcattatccattacaataataggtgcctgaagacaccaagttgtaaattacttcacaggcgctgggtaatctccattcctttgatctctgcctatcccgtggctcatttttgcctgaggagctgaagccattcatagggtaacacatcccaggcggctggtcagcctttataagggatggttttcttggtttagtgtctccactctggtaagatgcattaaagcttgtctgcagaaggatccgagtgtcccgtgtatgatttcttgctggcgagaaatacagagagcgcgcgggacatatggtgccgaaacccgggaacatgtgaacatctccagcaccgcggagacccctctaacaaggcggattcagaactgcaggatggtaaattcgcagaggtatgttttttttctggactttggcttaggaatgttgctattgtgggaggttaatatagaggcttctatgcttttactaggagctattttgacttttctcactgttgtagcaatcttaaagaagtccagaattacatatcagaaaccgaatgtagtgagagatggggcgcgcctaacaataaaatataagaaaaaaggacctcccgggatgtctactgacaagggagtgtgtacagcaacaaataagaaaaaaggacctcctgggatgtctactgacaagggagtaaataatttgttagatgattctgtaaataagtttaaagctttaaatcttgatagctctaatgactctaaaagctcaagagatggggttttggaaggaacagctcagctggatgagagagagacagagaaggagggagagagaatggggaatggccggtcacaccccggtaaatttaggagagatgaggactcaaaacctagcctctgccctgcaacgaaactggaagccttggagctgaacagctcagattctaagattttagactctaacaaggaagcagagctagaggaggagctgccaaaagtaaaaacaaatatgaggccatcgcctgttaattcagcgggtgtacttctatcagcacacccactatttggtaccgactcctttttaccatcagaggagcggagacagatggctttcccagtctttgataggggaaaaggccatgcctgctattcaacacttcttaaaggcctggaatgcctggggctttaaagcctcataaacattgacgctcgggccaagcgtctcacctcaaaacctaaaaggccaaaaggaaatggtaaaatggaaagatatcttaactgatctttggagaggcccggatcctattctcataagatccaggggagcgatattgtgttttctcacaggatgaagaaaatcctctgtggatcccagaaagactcaacctgaagagtcccttcagaccttcaaaagtcgaaactccacccgctcctcgggaattgagagccgctattgttatccagattaactcctgcccttggcggagagattgtcactgcttaaggggtgggggtgttattgtttgatgcagccgtttgcggattgctgttatttttggctggtctgtgagaaaaggggtgggggtgaaattgtttgatgcagccgcttgcggattgctgttacttttgactggcatgtaagctccagggctcaaaccaagagaccgcccaagcgcttatattttggttaactatgttttagcaataggccgccggccagacagctcttgcacacctggagcctaggctcattgcacagggtagagtgtctggtttgtgcagccccaatgagggatgctgagcaaaggcatcgcacagagttgcctattatgcaggcttctctgggaggtacgttgacctgcataagggttacctgccccgagacttccctttcccagaaaaacggcagaggacaggtcgagagtacttcgggtcaagctaacagcctgatggtgactcccgtacacagtcttaatgtttgattttgggaaggtacaacctctgcctctatccctcaacatatgggtgacctatttgcttgtaataatataaagccttttcattaattaataaaaaagggggatatgtaggaagccggttcctgcattatccattacaataataggtgcctgaagacaccaagttgtaaattacttcacaggcgctgggtaatctccattcctttgatctctgcctatcccgtggctcatttttgcctgaggagctgaagccattcatagggtaacacatcccaggcggctggtcggcctttataagggatggttttcttggtttagtgtctccactctggtaagatgcattaaagcttgtctgcagaaggatccgagtgtcccgtgtatgatttcttgctggcgagaaatacagagcgcgcgggacaaatcataataaaaattccagtgattttcttcacagaaagagaaagaaattgtaaagttcacatggaagacaaaagatcttggctagataaagcaatcttgagcaagaagagttattgcctcttcctgaaggtaccaccatgcacaatttcaaattatattacaaagccatagtataaaagcatcataaaacttgtatgaaaacagacatgtagatcaatgaaatagaagaaccagatacaaagcctcaccatttcagttacctgatttttgacaaaaatatacattagagaaaagacagtatctttagtaatattgctggaaaactcttcaaggtataggcatagtaagtactttatgaacgagtctctgattgctcaggaaataggaccaataattgacaaatgaaatttcatgaaattaaaaggcttctatttagaaaaaagaagctgccaataagtgaaaaatcaccctacagaatgggagggagaaatatctctctgccagctatatatttgataaatatcagtatctagaatatgccaagaactcaagaaaatgaataccaaagaaacaaataattaaaaaaaatggaccacagaactgaacagagagttctcaaaggaagaaatatgaatggctagcaacattgaaaaagtgctcaacatcattatccacaagggaaatataaacttaaactactttgagattcccttacactctactcggaattgctgtcatcatgtgaacaaatgacaacaaacactgctgaggatgtggggaaagaaatccctatctgctactggtgggaatgtacattggtgcagccaccatggaaaacaatgtgtcctcgttgcttccaatgactcaacagcagctatggcttcctgcacagaaattgcataaaattaatccagtcaatttccaagcatggttgggagaaagactcaagaggttctcctcttagctgaagagcaattaacaagtacttactgttgaggggagggtagtttttcttcagtgttctggctgtgaggacatgaagttaggaggggaaatgttggggagatttgggagggtaacggggagtctgggttggatatgataaagatatactatattgatatatgaaatggtcaaataataaaatattctaagaaagtactatgcaaagattttagtattatccagatgtactatggataataaccatgatcaaattaataaacataatttatgccaattggtgtagaccattcatagatagagaatttaccagttggaccatcattacagtgtttcctgtagtcaatgtgaatgactggctgccatagactccacaaaatgacactacatcacaaaagagaaattctgagtattaagttcagatgatccttaagtttctcagggcttatgcatgtcagaattgccaatttatgttagaaatgattctctgacagaacacggggtgtcaatcaaatctaccatttggctttcttttcagcttgtcaaggtttgtcaaggttaagacaaacaccagaggaggtaaagttacagtgtgagagtctgaatgaagaggcactatgtttagattataaaatgatattgttttcaggaatgtaattttggatgtacatttatctgggttctttgggttgtgaacactgggaattcttcatatgagccagctttaaagatgggttctttggcagcatccccaaggctgcctggtacaatagaacatgcagttttgatgttctatggtagcctctggttgcaagcagccaatggaactgtttcacatgtcctggtgaccagtcatttgtcttcactggtcatgggtgactgagagttcttcaggaacttgaggtcccttctcttactattgtgtctttcctgagaaatctgggcttctccatcacatgggtcccttcatttcctcattacttgggctagggatgacaagaggtggtgattaagtgttggtttgattatcctcttattgactgggctctgttggttttcagtggaaagtctactcactttgaataagtgtttctacttttgattttgtattagtcttttgtaggaccaaagctacataacaacctcacaaagtcaggaatttaaatgtgtactctgtctctttcgtaacagatgtgccaagagtttctacaatgaacattgcactgtgttcttaggtcccaacaatatatgcaagtagaaaggatgaattgacttacatagtttatgattaatgacattgtaaagctctgcgtgtttctttttctaaacattcacttaaatgaatgtgttctctttgttgtgccctttctgcagtacaagaagccaatactttgccagccctgtttgtttacagaaaaccacggaaaagtgttcctgttgtacgcacaattggcaaagcagagaaacataatggatgtgagattaagagtggaataaaaattcttactcttgggctgatcatttatgatatatcaaaaaggaatttgtttttacagctgtgtgaataaaatttctgctattaccagcaaggtactatagaaacctatgctccagggttctgggatattttctggaattattacattgattccctcccttttattctcttttctttaactcagtccatctcttcatttgggtgccatgcaatgcaatggccatatgtcatttgttcatactaaagtcacacattacaaagttgagccattgattcctcttagatttgccatgaaaatctctatctcattgtctcaggaggccaaggtctcagcatccaatatgcatttgcttatttagtctcctgtccccagcctcctttcagaactgtatcccagcctgcttttagcatctggtcctctataccagaaaatctgttttggcttcttcagagaataagtcttttcttttcagttggagagggttttgcagagtgggggaagacatgcattctggctgcatcttaaaaaagacttaacaaattctttcctatttttcctcccaaatatttccttttgaatttcttattgtcccacattctgggacttttgggcaccacaaagtgtaaatcagcttgaagctagtttagaattcagttttcttttctggtctgctattttttatttttttctcccatctgttcttattttccaggtatagtaactgcatacctcagtcctagtcttgtctcattggtcataacatagtcacagggtcctaacatgtctacaaaagaatctgagatatttagcttccatccttagagaggatgatgagttcagaaagcataaaatgcagcttctgaactaatgcttttaagacctcacactcttgttttagaagtgtttcttaggaagtcatggcagacccctggttcaatggccatatttgtcagtctctctgttttgtcatgtagcaagaaaaatgtagttgtcattgactgcctaaaatacacacaaaaatgggggcactgtttaatatctggtcctggtcatagatcttagtatacagagcaagtgtgagtgactcagggaatctgggttcgtgtccagattctaccaacttctagctgtgtgacctttgccaaaagattagcttttctgtttcccagtgtttctggtggtcctttccctgtagtcatcttgggaagattaagttagctaatactcagaattgtagccacttacatatttgttgtgattgttacatgatagttttattactgttcttgatatacgcagagggagacaaggacttagcttgagggttaagagcttatctgggttctcattgccttactgtgttgtgccagagaggtagctgtgcactccaagggaccctgcgtctaagagttcagctagggttttcatttatataccattgtagatgtgatacataggtgatttcatgcacacatctccattcaatctcttgactctggaagatacgtggttttttttttttttttttttttttttttttttttcagacgcctccactctttccttgttcctagaaatgcccttcaagttcccagaacactccatcattatatgtgtagatttggcataaattctcctcatcctccaagccccaattccagagtttgatgcatcagcagctgacttatctccttcctcccataaaaaggaatgcttttgctttagtaattctgttttggttcaagacctctttgtctatccttgagtacttttgtcaatgaggtcaggaactgctgggacaacagtcaagggacaccatcattatttttatacactatgtattttaaaattgttttgctgccagtccatgtgatcatataattgagactaggcagtggctgattgtactagtgatgatgattcacacttctcaaataagaggatgattcacacttttcaaattgctgggaagtcacagcaatgagtccttcactagtggagagctgttcagcagtggtggatttgctgttaactttcctgggtacacgtcagaggcttgcatgttgtggatgtttgaatgagaatgtcccccatagtttgagtgcttggtctacagttagtggaactgttggggaaggattaggagggatggccttgtgggaggaagtgtgtcactaggggtgggttttgaggtttataaagacctcaccattccctgtctcccccccccccccgtctgcttcgttcttgtgaactgtttgttactgctccagtgctatacctgctgacatgctccctgccatgatggtcatggaaaccactaccctctggaactatgagcccccaaataaacgctttcttttataagttgccttggccaacagtgtctctcctcagcaatgagaaagtaagatagatgtgttacaaagtaaaaggatgcttagtttctgaggaaagagtgactgggtctgtttccttagtatttacaaatagccacattgtactaaagaaagagaagagacctggggtttatttgaccctgattccaaacaaaccaggcgtagagcagttgtttctggaggaaggagtaaagagaaactaggaaagtactgtcctatttgacaggaaaaagtttatttcattcttagagggaagcatgaaaagggaaccagcaacgtgagcaggagtgtagggaacccgacatgctgtgaccctgggaagtcatgtggaggtgccacagcgagccttgtgcaaaatacccaagaatgtgagtcttagagatgctgctcatttgaggtcatttgtggtattgacaaataaatctcttttttagccatggctgtttctagaaaactctacagtttattaaacaccctgtaaagtaagtttcattttcttgttttcactttgaagttggaagggctaacttctgtattttgacttctttgatgaagaaaagaaatagcatatggaattaagaactagaaggcaggagtgagcaggagaatggaaggaagtttttcttggtgaccctgaagagtgtgtaatatttgtcggtcattgacctgagaggctagagccctccccagtgaccttcacaggtaagagtattatagcttacacctgggctgtttatgtggctagtgattgactgatatgggaaataacctcacttctattaataagtagtatttgtgagcaattttgctggatggatggagagagagagagagagagagagagagagagagagagagagagagagagagagagcagagagcatgcaagcacatgaacagaatcccttttctccagaaacagtaattatcagggatatttgtagccagggtactaatattttgactggctatccttgctttatttagtgctactagcattgagattatttcttcccactttcatgcccccaaaataccagtttggaggtaaattatctgataatcattccaaagagctgtgaagattaatgccaaaatttctgtaaaaaatttggtgtgaattacaaagttttatccaaatgaaagggcttaaagcatttgagttctttattgtgttctctggtggagacagacagtcgtgtctgaaattgctgtctaccttaggccctgttattgctctgaggtctgctcaattttgcatgggaataagcttgccataaatgaatttttatttgaaagtcaagtggtgtgtgcttctctagtgaactccagagaactcaagtggagttctctagactccattcccttgtgatatattcaggatcctcatctgtatacttgatgctttctgtatttcaccttaaatgaataccttgaaattcatggagtctttcatatttaacatgtcataattttgatgggttttgaacatggagggtatctcagtacgctgggaaattttaaagactgcttttgaatggaaacggccgtgtggtaaatgtgaatcatgaaggaaggaagggaaccagcctcagagagcatccacagcagccttctcagaagccctttacatcagcccacacaaggaaggtgccatgaggtcagcaaatacactttacactccttctatgtggtagaaattgtgtacacatagacacagtgtgttcagacagatgtgacccctcatttctatttcatgatcgttataatcactatcttcatcttcagtcagaccaccatgtatctttcctggcactgcattaagggctttactctcattgtcagttatggtggtcaccatgacagcaaaaggattgccactattaccacagattcatagaggaagagactggggatcagtgaggacaaaccattttctagtcaaggaaaagtgatgtttgaatgtggtcacaagtctttctgctataaggtgtcacacccttctactatggcctccctataataagtgctgtatggagaggatggtagtggggctggaggtgggaggggtaagtgaagaacacttgggatactttgacctccataggataattttttcctaagtaataagctttggtcttaggggaaaagatggtaagtaaacgattttcttcaaattattagaaatgatcaagtacagactattaaaactgaagactacaatactgataataataacaaatacacacaatcaataattagcggcataatgaagtgtatctgctgtgagctttgtgaatatgtttgtatgaatgcctgaaccttggttagtattcatttgacccagttcctggttttgtcggtggaatgaaacattgtgttttggagcacaccaggcattggcattgaatgaagaatatgtcatggtgcatttattctaggatacagttttttggatatttgcttttgatgaagtttgatacctttcaacccttattacttctttgaacacaaatggggaggtttgcagtttttaaaagtcattttaaacttcctttctccccatttctgactatagaacctccatttcatgggttactcagtcttaggggttgacaagatggcttaacaggtaaaggcacctgttgctgagcttgttgatctgagctcaaactctgggacctacatggtaggagagaactgacttctgaaaattgtcttctgaccttcacatgtgtcccccacctccccaaataagtgtaataactctggccatggataaactgccttgtgtcccacttcataggtccagaatttcttcgactcctttgtcacccttgtgacagtgtaaattaaaaaatgggcacttacaaaattaggcatgtccccattctttttggaacctctcttctgcaatttccaggaaggatggatacttctgttggcattttctgagcttaggtgttagcttgtcactgatgaggtgtatttagtaacccaggtataggctaatggctcagggctggagggcagacctggatgacatcagttgagccctagttctccttttgtccgaattgtgcttacccttaaagtgtctgggcaggataatctacatacccatccatttatttctgctttggctggattaaattagataatttctagttgtatttatagttcactgattatagttaaataaagcaaatttcaccttatacttatgatacctttacattaggtgaatatgtggtgctttattgcgctctttttaaaatggtttatttggtatctgaagcttggcaatgcagctggacctgctgtatctgtgatttctccctgtgtgagtggtggggagggaagagtgggtgagagggcagcacacagcctgtggctcagaccatcatgcccaacaagaaaggaaacgtgatgccacttactgtcagaactacttgggttaccatttgaaaccacctgggtttccaggctctctggagaattattcctttgttccctttctttcttcattgtattcatttgaaaatgctttatagaaaagacttatgtctaaggtgtggggaaattcaccatcatcattctttttattgtttaccaatgtgatgcttaagtgtatatcagaagactgaaattcactaatgtgaattcaaatacaagaaaattaaacagttcaaaaacaagggaagcaaagacatattttcaccattgtcacctggtttcccatctgcctttcctttctcccccagtggacttatggtttgcttcctgggtctcttccaatctaactactggttttctcagaaacatctgagaataaaaattggattttacaaataacccctgtgcattacataattgaaaattaaatataattgtgaaaattaagtgttaagcctgttactttccttggctaaacacacagaaaataataaaactaagaatctaaaagggatgtaattacatatatatgcttgatcatcaaggaagtcagccaaaaatatgcccaattccctttccaaatcaagtaggtcagtattgggaggcatttagaagtctttgcaaaatagagttgacacactataatcatttaatggcacaaattcccattagcataactgctgcataaataatgttcattatagtgattagaaatgttaatttcttagagcaatcaaaattttctttcatctccaatagcagtactttttaagctgcaggtttatgacccatgaaatcaatttagtagggtacaatcagcattcggaaaaatagattaaaggggaaaatattcaatttcattgaatattgtccatgtaaatatcatcccagatatcttaatttgaatttttaaagtgcaattatgtataactccttgattatgacatacactgtatttcatttgtaaaataccatgctaaaaatagttggaggacaggtattctataatatgacaaatgaattccagggctgacctgaaaatgatccataatttctagtttcacaaattgttaaagacaagtgttttcactgaacatttatggtcactatatttgcaaagataatcagattccttccccatttgctatgaaatttgttcatggcagttgttgtcaatggaattggggatatcttggttgtatatatgagctctcagtttaggaccgaaccgttctctagacagatcctcttgggcacactctaactggctccatacctcaggttccttatttataatcgaggctcatgattgtgcagaatcagtgaatgaattcactaagagctctttatagttttgggcacatagtgcccaatgttcaataaacattgcttattgatattattactttcctcattacccttatgagaatagaaaatattagactttcttgcatcaaagttttaccttgccctccaataaaggtagcataaagttcagagtttatcttgtggctcagcctacccatagtgccctcccaggcccttaattctccttcctggcatttatatttgtagtttaaatgaaacatcttacagaaatgttcaacctgcaatacaccacacactatgagggcttgggatccccttgaaatgtgatgaagagtctagtgaatgcatatagacactcagggagagggtaggaaagcctgatgatcacatctgtcttaggatctcatgtggtatagtgagaagtccaatatgttggacccaagtccaggcataataattagtattcattgttcagcatgttacttcaactcttgtagcttttcttactccattggcaaaggggagtgagttcctgaatcatatagttgttgccatgattaatgtttactgtagttgtaaagaggttggcacagccactgccacataataagtcctcaagaaaatagcgatagtgaaagaagagtaatatactagaaacagagcatgaagtaactgtccttttaaccatgaattatagaatacggattctatcactggatcactgagtaagccattcacttttttatccaacaaaaactgaatgctgtatgaatttgggattaagtactgtgctgagaaggtgaatgaatgagatagcttttctgctcttactgagtttatgatctatggaggtcatgggtaggcaatgactaggcaggtggtaaatgccactgtaggtacattatggagctaagggagaacacaaatatttgcaacggagaaccacattcagaaacttttacggtttgcttgtgttatatatgtccagcctgaattttagaaataaacaagcctctttcttctgtttatgttcatttattaaaagtttttcaagtgtaatttgcttattaaggtatactaaagaggagatttgatctacagaatgtggaggaaactggtctttacttaaatatacctccaaggatgagggaaggtagtgagatatctttgaaagactgggtctagagagtaggacaaatatctaccttataaattaaaatccaacaaccctactattcctgtgtttaccatgttaaacagggaacacaagagttctgtctaatgctcagttacaacaaggagtataggctaagtttttatttctttctgctttcctcttaatgatatttgatttttaattttaatatgtgcacacacatttaattttaatatgcacatctaaacccacatccatgtagatggctttcagaataatgtaataataattattaaataactttagataactttgcattttacatattacattaacatttttcatttaaatttttatgattcaatgaacaggaattacattatattcaaaacttacaaaattgagtcacatgcaatatgtctgcattaaaaggcttcaatagtggtaacagtgtcttacataatgggtcaatgggctgtcagtaattagatgtgacacaaaatcacctgggattaagtccattaataggagacacaaggtgtctatgttaatccatttaaattactttttgtattatgtggatagaggaactcttacctttgagtaatgctgtcagtatagctaagtcaatgtcctggtggccttctgatcccattcgaaatactgtgatctgcaatttgagacaaggagatggttaacaacacatttgtcctccagagagaaatcaaatcaatgaaaccacttctgagcagtgacttttttactgtctcagatgtaggttcctaaccatagggcaagcatacataatgaagatcagagctctgccaatcattaggagagagatgggtcaatagtctccaactggggaccattcacataactgtactgatagtggttatcaagcaagactttcaagattcaaacatgtaaattgtaacacagaccatgagtgaggaactgtgcttaaacatagctggccactatgctctgaggaaaaatgcctcatggcatgcgtacatatgaacaccataaccgtctctacacttattccttagcaatagtcatctgccttggcttttgtcaacttgacatagcctagacatacctgggaagaaggattcttcactgagaaagtgcctccctaagattgtcctatagacaagtttgtagggcattttcttgattaatgatcatttatggaagggctcaacctgctgtgcacagtacactcctgggcatacaataaagtaggcttctggagctagagagatgggtcaatggttaaaggctctggctgctttttcagaggatccagtttcagttctgagcacctacatggcagttcacagctgtttgtaactccagttccaggaatctgataacctcttctggcctctgcaggcaccaagcatgcatgtggtacacagaaatacaaatgtatgcaaaacacccatatatataaaataaaatcataatacatataaaagaaaaagaaactagtctgagaaagctaggaagagcaagtcagagttcctctgagatccttgtttcagttcctacctccacattcctgtcttgagttcctgcccttactttcctcggtgatggagtgtgatcctggggttgtaactgaaataaaccctttcctcaccaagttgcttttggtcatggtattttatcatagtagtaaaagactcaactaagatatcattcaagagttttgtcattagggatgcatatcactgttcagttctctcaatgactttgaatatcctttagaataatctagcagcatatctggatggtaagaaatggacagaaggcagtaaagtaacgtcttttccatggtgatcatataggagagacacacagtccctggagaagaataacaggaaggagagaggagaaacatcagcgaggaactaattcttccctgagacttgactgttgacaagacaaagagagagctaggagactcattctagaggagatgtttttgctaacaattgttattgctaccatgaactagctattgggaataatctctacttttatggcactgaagaattcccctcataaccttaaacctggctgacattgaaagaaagccccaagaaacgccatttgtatgcattcactctgttctccaaaggcccaggtttatgtttctgggtgggatcttttatgggcacacaggaagcactggcatccatattgatgtgcagcacaggatttctttctatcgtgtgccttgagaagtgaatctcctcaagtgactttccctttccctttgtagagtgctggctacagagagcaagtttccaggcataaaaggcaaagacaagcagcttcagcatgtggcatgggcagcattttagaagtagaattcaactggaaaaggaagaaagggcagaaggacacacagcccaggaaaaagcaagacccattagggagtaactaggaaagggcacctcatccatactccaactggttgttggagacaacagtgattcatgactaaatattggtctctagcagggatgagctaaagaatagtttgggagtaaaaatttgcatggaaaacttagtgaagggttttttgtaacagagcaaggcttaatctactttaaagaatctttttgccatcttcataaagagtttgtgaagattataatgggaaagtaaaaacattgctgaagggtaggaaagattcaataaaatgatgcatgcccttagctaactgaccagacattacaattcaaaaatatggtggtatccaataagtaaatttacagttagttgtaatttcaataaaaaccccaaaggtgtttttgtggctttgataggctgattctaggatcacatagaattatttaccagatcatagattttaagagcagtatgatgttggcattggaaacaatgagtaaattatgaaatagaatataacccagagatattcctacacatatgtgaacatttgaagccagacaaaagggtctttggaagtctgtggaaaggaagatgcttgttttctcccttctcttctcctttctttctctcatctcttttctttaataaaagggccacgctgtggtgctggtctcaaagttacaatctgtgacttcagctctcctggcacctaggactgtaggtctgaatcactgccctgagcaataagtgatgcagggacactgtacatttccatttaaaaaaatctgaatttcttctctacttcacaaatcatacatataaaattccaaatggattcagtatgtgaaaatgtataaaaatgtatataaaatacagaatattataatcagtaaagatttttctcctgtaatgtaattcttagatttactcccaaatacaatataagtacagatcatatacattcatgtattatttttgtgttatatgtgttttaaaacagttttcgaagactatatggcaattttaaaaatctatttttgagattgtattttaattataacatttctcccttcattttcttccccccaccccaccctttcttgttctccatcaaattcctggctcatttttcactaattgttattgcatttatataaatgtatctacacatatatttctaaatattatctcctagtaatatcagaaggcacatccataaaatctcaccaagagtgcccaagcatgttctaaaaatagttattttggagccactaatgctagctgttatatgcttggattaggtaatcctcttcaatttttgtgtctggagtctactgaaatatatgtcctcctcatggagcatgacacttcagttagacttgtttttatctgtagaatgcgctacataataaccctccttcaggtgtcctacccatggttttattggttgtcgtccctaaatccttatgttgaaacctagagctagtgtgatgcttctagggcgaataagagggtgttaggtcttgactaatgattgctataaattagtatcagtataaaagagtctatagagaactgcctaattcttttggtatgtgaagacacagctagaaggagccacttcggagccagaaagtggcctctacatctgtggcatcttgattctggccttcttagcttccagaactgtgggaagtaaatttctattgcgtataagacccctaggttatagtattttgttatagcagcctaggtggactatgacagccctcttcccgttagaaaaagtcctcttgggtggggggtgtggttctttgtgtcaggaatagtggtatgtattttcaaatacattatctttgattcctcatattatgtaataaataaaatgtgtccatctacataaagatggacatataaaatacacaatcaacaaatcattgtgaatatttagattagagggagaaattaataaggcttagttatctaccctagaattcctaaatagctatccaaaattgatcacagagccatttagcaaatcagaagatagccttgcacaaaacaaatgacaaaagcccatttcagtgttggtggagtacagctgactgtggatttggcactaggaatgtgtgactgtcaccaagtctcatgtggacaggggacagacacctggcatatgaacttttattttgtcactttagcattcaaatcctctgtgtgactttgggcatatcgtgcagattctgggatgtagaaaatgttccaaagagtgcttaacaagtaatggagacacttaatttctatgaagagaaagctatgttagttttcctaaggttatctaaatctccacggcgagtttctgttgcactctttgtacacagcaatctgtgggataataataataataataatgcttgactatttccacttatataggaaataaactgtataggattttctagtaagcaattataagtgttgttgctgtggtggagagaatagatggaaccataaattgttaaattacctgttgcctcagccatcttctgcttgcctaataggagacaaagtagcttggttagagttacataaaagttagaaggagaactctgaaattgagtggcacctgtccttatcacttgtcccatctaaatagtaagaactgaagaagggtagaagacactcttaccacctgcctttttgtagtggcttatatgtgggggtcagagtctgggatgactatgaggcaaaggatgtaaacagaacggccttctgttttgatttgtttgagatgttttccataggctcatgtattgaaggtttggttctctggtaagattctgtggtgcattaggaacattagttgacaggcctcattggaagcagtaggtctctggggagtgtatcttgggcactgtcttgttctgtggtccctctctttgcttcctggctgccaccagctggtcagtgtgttcctcaacaacactgccatgctgttctctctttggctcacagcagtggagccagctgaccatggactgaaacaatgagataaagtaaatctctcctttaatttttccccacaggtatttatcacagtgataatagactaatactccttcataagcatttgaaataaaaaacaatggccaaacaaaacgcatctatgtggtgtgtttgagttatggttacagctggatctctggtaggggcttccaggaggaggtgtgtgctgacttaggttttcatagaggtctccttctgcatagccatctagatattgtacttagcatttattgataacctcatagatttcaggtgggcgatgagaagtggctgtaccatgttctgaactcaagaagggatgctggaacagaagattatccgcatcctgctaagaaagaacctgagggaagatgtggtaatttggcgaattgtttaagtagaactcttttctgcagggctgggtggactgaaagatattatcattcatcaagcgtttaactgatggcaagatgaaggaattcaggatagcgtttgagctcattatttaaaagaatgaaaaaatgcattatcaaataggactctctgtacatctgacctgctcatctttccaatgcctaaacctcattgcataattagagatcacatttcagatggaaatcctccagatgaaagtaaactggcatgttaaatttaccctgaaatacaagattatcaggctttcacagtaacagatgtgaattagggtgtgtgtatgtgtgtgtggaatggtgagtggggaagtttcttttttagtcctaccctcccccccatagggtttctttgtgcagccctagctgttctggaatttgctttgtagaccaggctggcctcgaactcacagggagctacctgtctctgcctcccaagtgatgggattaatggcatgtatgtgccaccaccatctaagtggagaagtttataattggtttatggaggaggcttgttatcaagcagtttgagatggtattggcatgcaagacatttgtagtttttttttttttgttgttgaagtgtgggcttggttgcttcattgcccatgtgccatcctagaatgctggtgttgaaaaacacaaggacctgggactgatgagcaagggaaccttcagaagatgtcaaaggagcaccaaggagagctgggaactccaaggacatgttttataatttccttgatgacctgagatgttattttgtcaccactattctaaaactgttgaaatttgagatgaaaaccttgtggaaattaattgcatagaaatgtcttctaccacttggagtgttgatagctttgtacaccattctatactttgctttcccacttggcagtttattctgaagggcagtgctctcagctgccaggtgggcgtcatgatttgtcactggcctactgcttcactactcatgtgcactgtattgaatgtagcaaccattccaaggcagatttccatagtctgtcgttgtaaacatggttccagtgagtatcctcatgtgcgcatggggtgggagtatgcgtctgtaggataaaacttgcagagtaaaacttcttgctcagatgctctgagggaaagtcccttcatttgctgttctgattttgtctatagtgccttcactcttttctttgatattttgattcttacagtatctgaaaaaaacatttaactttagagtatgtaatatttataatggttttgaaattctagtttcttggggttttttgtttgtttgtttttgagacatgctttctctgtgtaacagctctggctatcctggaactctgtagactaggctgcagaccaggctgtccttgaactcacagagatctgtttgcctcctgagtgctgggattaaaggtgtgtgccacaatgcccagcctagtttcttgtttttaattcagaaattactgaaaaaagttcttgttccttgctaagcacaaaagtgtatatattttggttgatttttgtcatttgaggggcagaaaaggagatacgtgtctcattttttatcaaatatcgtaagtataagtgtaatagaaaatgtaaattaaatagaatgttaatctaatcatattatagataattttgcaaaagctgcttttttttttttttggtttttcgggaaagggtttctctgtttagctttggagcctatcttggcactcgctctggagaccaggctggcctcgaactcacagagatccacctgcctctgcctcccgagtgctgggattaaaggcgtgcgccaccaaggctcggccggaaagctgcttgctttctttctttctctctttctttctttctttctttctttctttctttctttctttctttctaacttactataacattgacatttttaatgtgaacactaactctaattctagcacttgtctgacatggctggttacattttcaaagcattatgggatacaggaagactaacccagtttaccaaatacaaaagaataaatgtggaaaccattccaataaaaaagtttttccccagattcagcttccttatggacaaactacatgagcttagataaaattatggctttcatgtggaaggaattggagtttgaaaatttacactcttccctccctccccgcttcaaaccagcagccaaccaacatcattgcttgtcttcattttcattttgtgtcctcctaaaagccagaaatttagtcactgtactcatcacttacaattcgtgcatggtacttaattcaccaggctgctattctgagcatctctgcccagtatgctgagtgcggaggatgcagtagtgaagcaaacagataagacccatgctttcccagagcatcctgctctgccagcaccctgataaggggaaatgagagagtgggtgcagtatatgatgccatgctgtgaaatgttctgtacagccctgcccctgcctcccgtcaacacttttctctgttgctgccctcacagccttggttcagcctgtagcattcttcaattttgtgttgattctggtcctctctctcatctcctgcttctttcctgtgaggctagtcatgcaatcttctgtattaccccttctctccccccccccccccgctgtaagactttttaaaatttattatgtatacagtgttctgcatgcatgcatgcctgcatgccagaagagggcaccggatctcattatagatgtttgtgagcccttatgtggttgctgggaaatgaactcacgaaatctggaagagcaagcaaccagtgctcttaacctctgagccatttctccaggcccctgtattaacttttttagtgacttccatcactatacaagacagagattcttagcagggtgtccaaggatcgctggcattgtactcccagcttgttctgcaacctctcttgctgattgcacactcgttttcatgcctcttgttgccatctccaccaccacagccacatcccatgcacacacaccagacatcccactgtgtgggtcaacctactccttttttgagaccctgatgtttttggtttcttgtccattcagaggatttttagcagaatcccttccctttcattggtgaactaactgtaggtcttccactggacatgaaccactttaagaagtccttttacatacccaggagaaacctttctttgtgctcctattattctataaggtgttcggcgactctgctttccacattttattactccaatgtgcatgcttatctttgcataaaggggagattaacttcctggaaggagtcctggtccctgctcagtaaacatttgttgagtggataaaccatcaccaaatggttgtgtttaaaaaactgatttaaagaaaataaagaatttaaaaggaagtagcacatgcctcacaagtgctaagaatcaattttagcacaagagtctactggatactatgttactgttgccggattaaacaagtctgatctgaaggaggatagggtgtgttacttaaaagcattgttactgagacttggtttaaataaggggatttgagagctgcagcagcagaagacaccccaaaataggtttcacaaaggtgtccaaatccttgggtccatgtgtattaaactacactcaatacaggaaaaagactcaaagtgaaaatatactacagggaaatgaagcagaaacataaaatgacttagtgggcagcctaattcattgtttttcttggaaataaatgagccttttctcactgtgaaaatagcaagatagagggtatgccactgagttcatcatggactttccattttttaaatccagtaagtctcaggccaaacaggaagaaggtatggaagaatatactgggggaaattaaaccaactcactttcaaagtacctatttattaacagcttaattcgtgacatatttctgtcacagtgggcatcaaatctgtgaaaacagacatagatattgagtagagcttttgaaaatgaaaataaccacgatattacactgaaaaccaggcataaattgcaaggacattttggctccatcgatcagaaatagaaaggaacattccacactcatatcctgctgctagctgtttgagagatgacatctgagtttgacaaatggtttgtaacgtgtctgagaactttacagaaaagctataactacaaatagatgatccgcaaaggaaattttttgcaatttcaaaaagtccatcaataataatattaaccaatagattcaaggacactaaaatgccacatgaaagtttccacagaagaaaattttctacctggaaattgtggctcatgccagaaacccagtatcaggaggctgaggtgggaaggttgccatgagttccaagccaaccccagctacagaataaaacattgtcttaaaaaaataagcaacagataacctacttccccacacaggacataatgcatttctgaaatgttccctgtttgaattatgactaaattctgtagaggcttcagaagaagggaagaattgggcccaggaattcaatcatcacaatgcagtgctttttattttatttttatttttctattgtttttacactgctggggatcaaactaagggccttgcacatgctggacaactgttctatcactgggctacatccagctaatcataacatttcccctatgaatcactagtatttaaaataactcgaaacaactaaataattaataaaaatgcaaaaatatattctcattaagatatggaatgatcaaaggctgatgacagggaaaacaggaatttcaaatggcaatcaaaggcttttaagcacacaatggctttaggtttctttctggcattatcagaggtgacttggtacagggggagaatgataaacattcaagatcagaattcggggaacctggaacttcgtatttattttccagccttcggaaagatgaactttttgatgaaataattaaaattgttacttggtcaaagtgactgactctagtaagggacatgcaaatttaatgtgcaagaaggacgggaataagaggaaattcaaatataatttcagatgagaaaacaaaacagcattggagacagaaatgatatttaaaattagaatattaatatcagattcaattacttgtaccaagttccaaatggactactgtcatccctgagtaatcatggggactgaccccagtaccttccataggcatcacactcagaggatgcacaggtccccttgactcaacagaattgtgacgtctagactatgtataaccttccacacaggttatgttgactctaaatgaatatctagtgcaatgtaaatgtttgcaaatagcaatttggctgtattgctcagtgaactgtgatgagaacagatgcagctcttttcaagtaatttggtttgcatctggttgaacctgtggctgtaggacctgtggacacagatgggatactgggctaactcttcatggtatatttttgaataagcttcatattttgtgctgagctatttgaataaagaagtgctgcagagacagaaattgggtgacattaatataattgcagtatgttctataaagctttgtgtataattttgcatattatataaggtttttttttaactttgaaaaaggatgtgttgttatactgtgggcttgttagtttattttcattcctttgaactttggtacataatttgacttaggttgtttttagtggaggattgtcttatagaatgagtcatgtctagatcattgttcaggtctgtgttaccccaaaggaccctataggcagcaacttggcagttagttaatgaagggagctggagaaagatgggtatgctttgtattctaatcctgtcataatttcaaatcactagaggttttcccaccaagagatgtagttaagaggccggaggtgtagttttcttcttataaagataatatgcttgccacaaccgtgtgctttcttttctctcctcccctcccctccccttccctctctctctcttctctccccttcctttctctccccttcatcactcctttcccttccattccttccctctctttctttgcccctctctcttcccagaagagaaacaggaacataatttgaaacattgttttgtatgccatgttctcaattaacattatatttatggattgttgagaacccttcaagaatatcatttaagtatttgtagggtatttcatctgatggatataattacagttcttttaatcaatgccccatggtgactcaattacattgcttcgaaatgtatgctgtgaatcaagataggatggaagtctggagtatagctcttgttctgtacttagcatacagtccttagaagaagttcttggacatgcgtagcttttgtcatagctagagaggagtcatagcatcacagagtgagttgaagtcaaaggaagcctgttgtgtctttgaacctgatttgctgtgctaacactccaaactattaacaaatgcccaagggagggctgatggttccaaaatgatactggagaacaaacccctgcctctgttgataaagcaagctgggtcagatcttgtctttactgttaccagccaccaggaggagcttcagttcttgtttctctcccagtttgccgtgcctgatttttcagctcagctctctgaggtctgcttagggtctctaggccattctggcttatataactgggcatgtgcaagtgaaatcattcagtgaacatactgcctggtgactgcttttttttcagcacacaagccatttcacagtaggaaaaatttaaaatataggtcagtaattcacccaaggcttcctaaactcatgattggcatatcattcatcattgaaagagagtgcttccaccctaaaatgacatgtaggaaggcagggcaaaacttctcaactgtttctgtataagggcaaaatgtagggtggggagcaacccttcatgtagttctcaccttctagagggtggggactacatggcagtctgtcacctgtctccctctttcagttcttttcctgatggaaagttgtgtgttcacttatcatataaatgtgtactgtgcctcactggatgctaatgggacagttgccataggacctgcagtcacattttcaggagcttctttgtaaagttcatgccagagaataaaaaataaagaataaagaacaaagaaataattgttatttataccttgccagccaaccaaatggatgaaaattaatttgtaccaaggtagtattttccatttcaggaaagagcattgctgggttcatatacagttctttcatatatggttaggaataagtataaatatctctcaggactaatacccaggaccacaggtgtgcttctagtctaacaccatatgtacttcttattgagctataacaatttttctgcttttttggtagcaatttttttcggacccgtttcatcaccacaggacagaactacatctttcccccttgtttttctgatatatatatatatatatatatatatatatatatatatcataataccacacatttctttagtaaaaacacttctttgagacactgtcactaggtgagagatatcacaaaggtgccatgaagtgctccagacagagaaggttctcacttccctcttcaaggtagttcagatccctggtaacagcactactgatagtttccaagttgggtataccagatgtccttagttcgcctctctgggaatctgcccatctattactgggccaaccccacttttcagacttgggcagtacaaacacaagactgagcaagtgaaggagctttgaaactaaggagaataagaatgtaaattaagggagggctggggtaggagggataactgtggttggaatgtaaaatgaaataagaaataaaaaatggaaaaagaatataaagtaatataaatttctttgtatatctcatttcttcttccatgtccaatgataagaaacaccagcgacaaatgtcttgaaggtagggcatgacaggctctctgagagcagggtctttgatttccattaggtgggctttcagtaccatatccagtggggcactggagaggagagctgtttgaatcacattcccttcggagactaaaagattgtggtcaggtgaaatacttgggaagaagaaacttttttttcagtctgggtctccaccttaagcctcctaggtccatgggttttctctctatggcttgtaggatgagattagtttagtttgtgaaatgtctagtgctgaagggatcttggtgtatacactcttacatctcagaatcaaaataagtttgatcagtggtcactggggctctctttagccctagaggctataaactttattctccgaatggcaagaaataagcatcaggacatactagtccaacctcctacctgatacactaattcctcctaaaaattagaagaagaaaccttgatttttatgggtaggatcaactgaaaacaatcacgttttctgtcatatgtagtctgttcaatgatttaggggaaattttcagttgaaacatctcctcctcttatggtgctgtgtaatggttccataatcttgttttctgccacacaaaaaatcacattgttgatggtagcccatattggcatatgacaatcttgcttccactcagaaaaacctatcactcttcagctcatactactccatctgtgcctagggacaaggactccccactgtgaacactggcatgtacacaggctggccctggactagttagtctcttactccttcccaatacctacacacattctgtgttctctcttgaagatgacagaccatgagcagagcatggactttgaacaaggtggaccaaggaggggatgatgctagctagctaagagatgcataccttatgccacccatggtccctctccaagcttcagtaccttcctatgtgagtgaaatgggggcaactcttcatctcaggattacttcacagtgtgatgtggaatctgtttctaccttcaggcatgggtgtgggccatgacaattcccctccctctgctctcctggcatgtttcccatctctctcttctcctgctggcctgatccatccaaaaactctgcctggctttcagctctttgctctttgagacaggattcaagcattatttctttcatgcccatcttggtgactatggcaacttccttatcccagtgtggagactccaacagcattccattggtactaccaatgattgttcagtgtgcatttgcagtgtctcaaatgctgcatgcatgtcaccatcatgacttcagccagcgtcacaaatagccatcactagttattgtcacagacaccattttacagctagaaagcacgtggaaggtcatgcagttgggaaaggctgaggtatactggagactatactcttaggaccttgatacaaaaaactccagaatgaatgtttgtattgtttatgattaacctccaaatctacaagcaaaagtgagggtccagcgttactgaggtttgagctcctctaaagtgaaacgccaagcatggcatgcctttactggtgtgactggggacactgggcgggggggggggactctacctgggctctggataagaaatattgcaaagacacacccacactgtgaccagatcttaagcagaagatcctggtcagctcttcctgaacccaatcgggtcagctcagctgtggttatgcgtgtgctatctgaaaagtagaggtcataagaaatagtattcctgttatgagagatagtcagaagcaagtcttcctggccttgtgagtaactagaagcatactggtgatggatgcatgagtctaatgcccaggctttgtggagtatgtatttgccccaagataatcctatgttttgtttgcttgagtaaacatgtttgaaagcagttgtaaatggagctataagattatatcattacatgatattattgtcttaaacaaagactaataatagagagcaaataaatgagaaaaatcacaaaggccagttactggcatcaaatccaaccagaccctccactgccttgaactggtcctgtgtgcctggcttcagtcccatgggcagagactgtcccttgtttatttacacagtgctgagcctggagacattgttgtttctctcttcccttttgcagttttttatttcaacttggcttcctccactgctttttttttcctagagccactggggaagaatgagaagcaagcgggggttgggggttccttttttcacatgactgaatggaaatacaaaaggaaacaaaatgtagccccagttggcttcccccttaaaccagcttggcagattaaaaaggaagctggtgggagaatgaagccttcacacaaaactgcattttctgacctgacaaaggaagagtgtgacattcgttcagtggtgaaagggactattagtctagggtcacattatcctgacctacagtgaaccctgttttgaaaagttttctattcttttgagctcagatggaatagattcaaagaaagaacaattcagtcgatcagctttattgtttctctggaagccagcgtgatttctctcctttcctagtgccaatatgaacacagagccccgagaatttctgctcccaggattgttttgttgtgtcacatgtaaaaaattaactggacctccctgatagtttattaagaagtccatattttccagtgtaactatcatcagtcatgaggtagtccatggttttgatacctcctttatactgagtccaggatttaaccaatgcccaccattgccaggtgcaagctacagcctctcctgggttattgtagcagcccctttgagcagcatccttgcttccttccccacctcttcaagaccattctctgcataacaacagagcactgaagtcagcagtctctggggtcaactctgtaatgcttctcattggctatactttcccctcagcaagttcacttccatctggaaacctccatttcctcatctgaaaaatgggagtcattgccattcccaatacagtcattttctatggaaagtcaaaagagataactgcatgttaagttctttgtgtgagcattatattattataaaagggggcaagttttgacctaatgaaaaggtctatagggagatctataaggaaattatataggccccatgtgtagaaacaacattctattgtggtgtatattagtgatagaacagttatctatcatgagtgaaggcctgggcttgatacccagtacagaaagaaccaaaccaagcataacttcaattctcattggtccaaaaactttcagaccttacagaaagacaaggagtggaatacataaagggcaacagggaaatggcatagttctttctgtcccttccttagttaaagtcctgctgaatgatgagtagctatgtgaatcctcatgtacactgaaaggctttaaaatatattgatgtacatttactgggcaaaatgatgggattcataaagacagttcctttcaagtatagcatgttctttgagcatattcagcaccaataccaccctctcctttctccccctcctctatttggctcccaggagcccaggtgcattgttggctaacatggtctcttctgttgagaaagttaaaaaaaaatgtatggagaggaataaagactcggatactataatacattacttaatagcagcttcacaatagaaaaccacaccactaggcacctccaccactgttgcaagactcctagaatgtgtgaacaaatctgggtcacctgatatctggacacagtctcttaagttattgtacattttaaagtggggatggaagccagggcttcacacatactgagaatcattctactactaagctgtatccttagcccttttatgagttttgactattgtcacaggataacccaggccctgaactcattctgtagtccaggctggcactggacaaacttataatccccttgccttagcctcaagagtagctagaaccacaggcctacagtgtactcaagaggaaggggactgctgtcagtgcaagaccgcacgctgttttacagttaatgtttttatgggaatgaatattctcaaacaatgataagagtatacatacatgttctcctcccttctcgaacacgagggaatgggatggtcaagatgggggaaggacagagagggagagcaaggaaagcggtatcttaattgagggaaccattatgggcctattgagaaacttgacactaggaaaaatcccaggaatccacaaagatgaccacagctaagaccctaagcatcagtggacagggtgtctgaactgcctttctcctgtaatcatattgatgactacctgaatatcatcatcaaaccttaatccagtaactgacggaagtgtatgcaaagatagaaagctaagcactgggctgagttcccagagtccaggaagagtgggaggagtgataacatgagcaaaggtattaagaccagtttggagatatccatagaaacagttgacctgagctagcgggatctcactgactctagactacagcgggggaacatgcataagaccaaactaggccctctgaatgtggggcttaggcagtctgtggggtcactggcagtggggcaaggatttatccctagtgcttaaactggctttttggagcccattctttttggagggaatcttgctcagcctatatatgggggggggaggtcttagtcctgcctcaaagtgatgttccagacttcctgtactgcccatgggacgccttaccctctctgaggagtgaatggggtggggatgaaggaggagaggggaggagaggaagagggagtgggaactgggattggtatgcaaaatgagaaaagattgtttttaaaattaaaaaatgatactggtctatatagtgagtttcaggacagacagggatatacagaaaaatcctttcttgaaaaaaaatccaaaaaacaaaaaaccaaaaccccaaaccaatcaaataaacaataatgacaacagaaacccattccattcccagttagctctctctgcttcatgcttgtgtgtaaatatatgagttctcaactactgcttcagtgccatgattgtctgactgctgccatgattgtttgactgctgccatggtcatggatttagccctctgaaactgtaaaccccaaataaactgtttcttctagaagttgtcatggtcgtggtgttttatcacagtaatagaaaaattacacacctttaattgcacacctttaatctcagcactcaggaggcagatatgtatgtatgtatgtatgtatgtatgtatgtatgtatgtatgcatgcatacatgtatgtatcgttagcatagtggttcattatccttaccaagtgtgatgttccatacggctatacttttatacaagtgacatacaataggcctttatacagcccacagaatgggaaaagatattcaccaatcccatatctgacaaagggctgatttccaaaatatacaaagaactcaagatgctagtcactaaaacaccaactaatccaattaaaaagtggggtacagaactacatagagaattctcaatggaggaatctaaaatggaagaaagacacataagaaagtgcttaacatccttagccaccagggaaatacaaatcaaaacaactctgagataccatcttactcctgtcagaatggctaaaatcaaaaacactaatcgacagcttatgctggagaggatgtggaaaaaggggaacactcctccactgctggtgggagtgccaatttgtactgccactttggaaatcagtatggtggttcctcaggaaaatgggaatcagtctaccacaagatccaggaattctactcttaggcatatacccaaaagatgcacatacatacaacaaggacatctgttcaactatgttcatagcagcattatttgtaatagccagaacctggaagcaacctagatgcccctcaactgaagaatggatggagaaaatgtggtacgttttcacagtggagtactacttagcagaaaaacaacaatggaatcttgaaatttgcaggcaaatggatagaactagaagaaaccatcctgagtgaagtaacccagtcacaaaaagacaaaagtggcatgtactcactcatatatgtactttagacatagagcaaaggagtaccagcctataatccatactgccagagaagctaggaaacaaggaggaccctaagagagacatgcatggtccctgggagaaggggaaagggacaagatctcctgagcaaattgggagcatggggggtgaggtgagagggagctaggagaaagagggggggagaacaggaggggagaggaggacacgagagagcaggaaatttagtcaggggaagaactgaagagaacaagaaaagagataccataacagagggagccattgtaggtttgaagaaaattatggcactaaagaaatgtccagagatctacaaggttgaccccaactaacaatctactcaatactttaaatgcccttctccatgagactgatgactaccttatatgccatcctagagccttcatccagtggctggtggaagcagaagcagagacccacagctaaatactgagctgaactctggagtccaattgcagagagggaggaatgatgagcagcggggtcaagaccaggctggagtgacccacagaaatggctgacctgaacaaggggttgatggtggaccaccgactgatggctgggcaaccagcatgggactgttctagaccctgtgaataaggatgtcagtttggaggtctgggcaatctatggggcctctggtagtggatcagtatttatccttagtacacgaatggactttgggaacacactccacatgaaggatgttctcacagcctagacacgcgggggtagggtctaggccctgcactgagtggtgtgacagactctgaggatcccccatgaggggcctaaccctccctggggagcagaagtgggttgggatgggggagcaggggaggaggggagggagagggaactgggattgacatgtaaaagaagcttgtttttattttaagattggtctaattacaattataaaaataaaaataaaaaccataaaccaaaaaccaataggccttcatagcaatattagtgaaagcagtgagcaatgtgctctaatgccatggttgtcagtcatgtttctaatttctcactactgttacaatcttgtgaccttggtgttatctgcagctcagcactgcttgtgacattgttatatggcattaaactgtataaccaaaaccaggaagcactgacaaaaaccatgggggaattctagttagagagggacatgcttcagagggactcacctatgcttattgagaaggctgagatttgattggacattgtaggctgtattagagcttcaatgggaggattttcttggtggggaggagctggaaggagaaagtgtaagtgaaactaagagagaaatgaacactgactcttatgtctgaatgtgtacttggctggggctatgggtggaggagaggccattagtgattcaaacctggaaaaggaaggttaggaacacactgtagatgatttcagtgtcacagcatttgggcacgctatgtactataccttatgccatgtatctgtatctatatcatctatatattaatccacacatcaatgttgttaggcctggagagtaagttcattgtccaagatcattcatgtgatgaaagagaaacagagttaagacctggtctcgaatccctctcgctcacatgaagatcttttgctaaagccaaacagagtcagagacagcggaagatttgaagggtgaggagggactgcagacaggacctggcttcaggatgccatgcaaatgtttgttatagagcaatgtacacacacttgagaggaagaaagaacctatgatcagttttctggagagtaaaactatggggcagctttatactcacccactggtccacactggataaaggaagtatgctcatgtgcaccactacacacagggtttctgtgaacccctgagccatgttaaacatggaagatgctgcatatgccaaatgtcattccacatgctgctcgtgtgtgattttactgtggtcctcttgtccacagagtaccttgttcaccactgcagtcaaatgccagaactttctctacatctctctattaaattggctgggttacatgatggtgcccatttatttacacatataaaagagtgaagcaattatttacatagaagaaaattttatagttaactatgaattattcactaatgtcaaataaaataagtttattctcacatatgaaatgcaatagctatttagggatactatattttgtgccatatgtatctctgttggtctatatgtcttgtctatctatccatctacccattgaaactctattaatccatacatcaattttgtgttttggagagtaaatcagttgctcaagatcacttagcactatttctattttagttccagtgagactccattattttcttttgggatgaattttgtgaacttctttctcattgactgtcagggatggtgttgggtattggggaatgtctaaatgacctcagactgcttacatgtaaagttcatgtcacacacacacacacacacacacacacacacacacacacacacacacacacacggcagagtagggctgaagatgaccaaacctggggttttctgtatgctaaccaaaataatgttctaacactgagataaaaccatagccctaaaagtttcttatttattttgaatattttgtggtgctagaattgaacccagggcctcacatgtagcaggcaaccattctactgctaagtcatagcccagtgctatatgtctgctgttctagcatcttatctctatggtttaacaattttccagctctcagtcatgtggctcatgattactaactgaaacaagtgggagtgctagcttaaaactcaatagagagtcatggttctggtggcatttgatagccaggactgtgtatgatctggtgtgtgggttgtctgataatgcccaaattcaaattaatgcttttcttttcttttattatttcgcagaccttgcatatattctaggtcacgaaagacattatagagtttatataaattggatattgccatattattttctaacttttaaaaagacttactttatttttatgtatgtgactgtgtttgtatgatcacatgtgtgcagttctcacagaagccagaagagggagctaatagagtccttgtggttggaaatacaggcagttgtgaaccatatagggcatgggtgttagaaaccagatcgaatctgcggcaagagcagcaagtgcccttaactgctgagccctctctccagcccctctgattgtatttaagttcttttctgctaatatttatgagtaagtgaaggcttgaatatatccagaccctgaaggcaaacagttgctaagtgaaaccatgtctgtctgtttaagtggcaacagccaagctctcagtgacagcactcacagtcatgcttcagcactccttaaagccttgtgcccctgcaaatctcactcccttcaacagcaccgagtgctatcattcctatttctccagtggaacgagcagtgacttaaaaacaaccactgaaagtcagggaggtagaattctctgcagtgtaagcacatagctggaggcctctccactcatgccagatgactcattatggttttatggattctagggagaaacagaacagtttggtgcttcagtgaggccaagattgttccatgtttgttgttggtagccagtgcttgatagcaaagaaccttctaagagaaggggttagatggctgcagagcctgattgctctgtggccacactgagtagtagttctgctattgaagctcctctccccttccagaaccttagttggaaagaaagacacagggctactatgtatctctaaaccatctctccatggctttggtaagagtgtctcctgcttgaccaaattatctaaatgtatttcatcagtgacctagggttcctctatgttgtgtttcttaagtagagaatttcttgtacacctgcaaaaggctctagtgtggaataaagcaagatgctaaagaaaaagttgagctaccaaaactgtaattgtaagtggcacactggcatggtgaatgacttgcaaaggtgtgtgtttgtagttagtaatcacaggctaagagttgcacaaagtagaatctaattatttttctgtccatcacttggtatttgtttctggattccaaggagagaagcttcttcctgttgaatatctcccttggctggccattgcaacaaaatgcctgtcagcttcagttacgtaaagatagtcacatggggacatttgttggtgggggaatccctgcctcaagcaatgctacatgtctctggttagatttcagccactcttctttttcctccctcatttcttccatttctttctgtaaaactattaactaggagtcttagagtgccaccaaactggtacaaccccaccatgtgatatttatttatgtgattttttaagttagggtttctctatgtagctttggagtctattctggaactcactctgtagaccaggctagcctcaaactcacatagttctgcctgcctctgcctcccaagtgctgggatcaaaggcatatgccgccactgcctggctccactatgttaactcaaaggcattgtacacacactttgaactgtacagatccaagctagagcatatacactaatacataggatgcacattatgaaagatatgtaaatattgtgcatacgtgtgtatacacaatagctcctttatgatcactctcggcatttatctcacattttaatattgagtagaaatgaccagatgagttagtaaattctttgataactacagtttaaggataatgtcattctttgtttttacacagaagaactgaaatgaagtagacttaatcaaagcttataatttcaacaatgtcatcaggagagcaatttgagattgtgaaagaataactgtagtttttagataatgagcaaaatgtgccttttttgggttgtgatttttaaagttaaataccctatattaacagataaatgaacctagatttatcagtgggggatattacaagattatacagtgggctactgaaaccttaagtaaaaagaaaatgatcgctccctgaggaggaattgggtgttatttttatcctctctatagaaataagatctgatttctgtcaggtagtagagtctaatgccagcattactggctccttataattaggagccactctgaaagaggcgctaaggctatactccagcaaccatgcagaccatagcctcatgggcttcaggcttgatggaatcaagacaattttataaagaaaatggaccgaaagctttttctttttaaaatgtatgaatgatagattctttaattatcaaaatattatggcaggagagccatgagttcaattaaggccaacctgggctacatagtgagaattatctaaaaaataaaagacaaatccatttacacacaagtatctcattctctttcttaaaaggacacctaaaacataccctctatactacaggggaccatcagggaagctaaccctccatctccataattcccggagctccagagagggaagacttagggcattttcccggttgcttgggtttcagagcctgcctgtctgtcagactggttcagtcctgtgagaattcccagatgtgacaggcagtcaacagctttgctggccatgacaagtttcatttcaggcagctcagcttgtaatttcaaggggactggctgctgttctgggcccaatcaacttcaggtttcaattgcttttttaagaactgcttcattgaacatactcagcagatacagtgtggcctgtggcagtgtggcaaggacagaaagaccccacaggcccttaaataaaagcacagttaccagttttctaaaaacagtcgacataatgtacataaaaaactccccctcctagaagtctaaaaataatttggttgttacatcataatcatatttatgggagtggcatgacattctgatatatactcagatcaggataactttgtctcaactctccaaatattatatatcaaaactcaagcttatatctgctaattattactcattaagcattatatatcaatatcattgtgctatgacataacatttaagtactgcagataagattatttagcctaccactaggcttgttacttgaaagctggtcatctgaagtgcttgttttatagatagggtgctaacagcatctccatcataaagccacgagggaagtgagtgagttaacagctatgaaataatggaaaggatcctactgtatccttggtgaacctgggctaattgatgcccatgttgaaaagctctagcagacacggagctgtgcccactcagcaaaggctgctgctgttgttgtgagtctgctgtcctccctggtcacagaagggctgggtctactggctcaccctacagttctggggatactctgctgacagcacctgaacttctgctggtgtgatcagcatcacgtataaggatggttagtacaaatgagagcttaccctgtagtgttgacagaccatagtgagccagcaagagcatgttttgtcttgatccatgcaagtaggattttttggtttgttctttttttatactgctggcatgatgaaactataagtaggtaatttcccttaggggctggaaaacatgatctggctccacatgctttgagacccagaaggagagactcaggtcagccttgacaggggaagagcagcttgtcaattagttgtctgagcctcctggagactcattccaataaggtaatttcatgttgtaaatctaggagaatgtttggacaggcagagggccagttgttttagtaactgctgctataaatcctccattcccccgatagtggttctcccactcagataccttactgagcagagtaaatgccagtcatgggggctgtgggccatgtaaaattaggcttggggcttgtgaggatgtctgcgcccccaaaagttatttatatatttctttccattttggttctacccaagtccaggggctatcttccttattctcaaatgcatgggaaagtgtttttaaataaaaagggaagcccggatgagtcacaaagcagtcaggaagatacaggttttctgggtagtgcctgtcaactgttccaaagaagaagggggacagagacgtggagcattcttcagaggagggtgaaagggaattcactttggagattctaatctacttataatggtgtatgcagcatgacttgtggggcttgtgcagtgagccatgacccccttcagaagtaggtcattgctttctgaatcagcagcagtaaggaagcaaccttgctggtcatatcccacgaggaaataggacttatagggagacattgttgtagctgctctggaagcacactgatgggaaacacaaatcctaagggaggcagggctggtagttcattagggaaaagctgcattcgtcacagccaggacaggctaggtcttcatatttctttttgtcatgcaattacttcttatcctgtggccccatcactggggctgtgttctcggaacaaggcttctttggtaggctttcagtaaggtcaaagcccatgatgcccgagagtcagtgccactcatcaactcaggaagttacccaactaagtgtgtggacattaaacaaattaaaattcactgtattatatgaaattcatgagtgggaagggcaagtaggaagggtcatgtctgtattataaggtttaacaatgacccctattcaaatgttatggtcacaggcaatctttagaagtctcctaagcagcactcccacacaattgttggggaggtctctgttaggcagatgtggggttagcatgttagtcagtcctaagtctttagatagtctcgttaggttcaaggtattgatatcaggatgaccccaatggttgttcatacctgccaagcagatgccctgtggtgaagatggaggcagatgttaggggcactgacccggggactcctcacaatctggcatacattcttcaaagtttacagccactaaggctaagtgctattggtactttatcctagttttcaactcagtctactgttttcaatgggggatgctactctgaaatggaaatgacccagccttatttttctgatgtgtgagattatatatatatatatatatatatatatatatatgtgtgtgtgtgtgtgtgtgtgtgtgtgtgtgtgtgtgtgtgtgtgtgtaattgtccaataccagaatgaaccagatacataccattaattattatcatattaatttacttacttgaagctgggaaaggccatgaactctttcatcctcctgcatccacctcccaagtacagtggttacaaggactacaaccatacctggttgtatctgtgcctcgatctcactatgctgttcttcttattttcactctgacttctcaatggacttgaaatattttgtgtgtgccatgcgcatatgtactgtatgcatgtgagtgtgctgctgtgcatatctgtgtacacacgaggaggctagagcagggtgctggctgggtgtgttcctttgtcactcactgccttattgccttgacactgaactagaatctcatcatttcagccaggctagctggctaatgagaccttaggatccatttgtgtcttttacctaatgctggcttatcaattccgaatatcatgcccagctatttatatgggtgctgggatttgaactcaggtccttaggcttacacagcagatattcctaccaattggatgtggtaagcacacgtagaatttgaagtgtagaacatggcatcattaacaacactaggtatatcacttactaggtataggaacactagtagttggtccctccctgcttctttttactcctgtcatcaggcaatcttactcttgacttccaggattggatagaataggtggttaagatcatgacttatttttctaatggacaagcgatttctcagtctttataattccccaatttctccctcatttttctgcctttactgaaattcctcagaagcattttgttttcttgctgtctactacttcccactcctcctcaagctctgtggtgtgtacagtcagaattttccttcaaaaccatggaaattttacttatccaggtcaccaatgagctctgttttgctaattgtgttggcagattttaatatttgcaaattccttctgtacttggctccagcataaacctttgtttttttttttcccccttcttctgtctcactggccttttctctgatctcctttggagcctcccttctctgctgggtatctaaacatcatggtgccccagctctcagccttgactcctatctctctctgcattccttcctcagtagcgcattctattccacggtgcaaatacagtgaggatgccagtcacacacctcccactcgaattgttcctgaggcccaagttcataaacccactgccttatggtaataccactcagacacccaatggcatggtgcaaataatcctttccaaaataaactccatttctttttaaagttcttctctcaccttaggtgcgggccatccaattctcattgtaaggccagaaatcggaaagtaaccgctgcctcttctttgttcactttttctcacccggattgttagagaagtccttttagttctaggttcaagcacaactcagccctcttcactgtctgtcactccagttcttatcaccatccattttgctgagattactaggaacattccttgatgctccctaggcttctgtgtttgccagggacaagatgttcttttgaagatctaagtaagatcacgttactgcaggactcaaaaccattgactgaattcccatctgattcaaagcccaaactctgcctggtttggatagggacctgcacccctcctccaggctgcttgtgcaacaacatctatcaccacagtccttactaagtttctttcaggctcactaaccttttgctgtatcactaatgctgtggggactaccggtgcctttgcacctaatgcttcaatcttcttggaatagtcagtctgtctttagatctttcacagtgagcccacccttcattgttttccaacaacatattcagtagtagatactaaaagagggcttatctattctccctttgtatatactcatcaaatccatgctgggtggaagtgattagccacaacagaaaacaaaacccacatcaggagttttgttctatttgtcctatatcattgctgtctactaatcctgcttttaaggtttattttttttaactatctgtatcactgtgtatttatcttaaatctttactgtcccttcctcattagaatgtgggcagaatgaaaatacatactgtgctgctagaataatacctggcagatagtagacatgctatgtatatttctggagaaacaattttaaaaaatggtttggtgaacagaagactgtcacaggtgacacgcaggggctttcccttgctctttgtgacttggaaggggctcagctctaggtagaatgtgaatgaatgttacaagctgaagcctactgcatggatgccttcagcaattccttagcaccttctggcttcctgcttagcattttttttttaatttgtcatgaatgatgacttggttttcaaaagagatgcctttcctacttggatgcttctaaccgtgagctttggttgcatatgtccatgtttatttatatacggtgtgtgctgtgcctggcatctgttctgtttcctgcccctctgtgtgcctgggcccaaggggtgtctgggactttgaaggcatgttatacggcacttggaatatccttctttggagccctctggcttatcctattgggtttcagaaaatatcaggtattgctaacctggcggaatgacagagccaacccgcatacaaggaggcaaggcaactgcaacggggaaggagagcttctgggagctggtgatagggaaaaacaatgaaattaggtctcttgagtgacagatggtggagctctggttagaaatggggtgtggagaaaccttttgtcttagccagggctggaacactggcagttagagatgaaaggtcctgttgatcttgagatctctgctgctggcctggggctttctcctccatcactctgccctcatttctgtctctagtgaagcttgcacattggtcctggtgaggcaagagattgggatggtggtggctgttatttgggtatgctaactttcttccagaaaagtagcccaaggtacttttctatgacttagggcctgggcatggtcctgaaaatttggggtttcaagattttcatattcatggtgtacttcttggactctcttggtgggctttttttttgtccctaccttgaccagataagactagcctaggtattctttgggaccaggaagaccagaactttcctttttggctctcaagtcccctgtccctatgatgaggacagaacagtaacccttacttgtcccacaaatacaccaaatttcctcctctctgcagccaggatggtggcagcagcacacatatctggacagtttgtttgctctcttggatctccattcaacactagatagagtgtggatttgaacagagagtaacactgaactggaggggcaggcagaggccaagtcatacttcttgctagctgagcaaacctgggcacagcacatgctccaagcacacattgtgttttgcttatgaagatggaaacagcattacctatctccagcggcacaatgtgatccactggcaaggagggacgccaataaggcatccgataagataagtctaataaaacatataggtttatgatagttaagactgagctaacagatgagaatcctagtcattggccaagcagcattgtacctaatacaagtttctgagtattcatttgggtcctaactcaggcaggcggctggcataaagctcacatgtggcttgtggggctcaggcggcttttggcggaaagattaattgtaacaatggccaagcacatggagaaaagaaacaatcaaacatcccatttaatcattctgtctatctgctcagaccccaaccaggcctgctcctgatgtatgataacgcttcatttggggtatcattggaaaagaaaggattttgtatgggcaaatttgattgtttttctccttacagcaaatgatggcggatcctttcgaggcccaaaaggaaataaggtacaggtaacatttataagctcctcaggtgatgttatgtgtagtcaaggtagggaaccacgactgtataagttattattttttgttttctttttaaatgcatctgtgttttgcttgcatatatgtgggaggatgccagattccctggaaccggagttacaaacagttatgaactgctatgtgggagctgggacttgaacctgggtcctttggaagagcagtcagtgcttttaactactgatccacctcttcatccccagactctatgatttcttaacaggccaaatttctgtactatctagtttttatgaattaaagaaaatatagcctatcaggtacagtgtatctggtttatgttgaggtctttgatccatttggaattgagttttgtgtgtagtgataagtatggatttagctgtactcttctacatgcagacatccagtttgaccagcacaatttgttgaaggtgctgcctgttatacagtgtgtatttctggcttctttataaaaaatcaggtatatatcggtgtgtggatttatgtctggttcttcactctgactccattggttgatggcacagatgttgtgggagtaaccaatcaatgtctgatttgacttaaggcacatcccatgagacagaacccatgcccaacactgattgggtgtccaagaaccagagacaaataggccagagacctggggtaaagtcaaaactactgatctaaaaacaagcatcagtaaaatgattcctaatgatattctactgttctcatagatcagagccttactcaggcatcattagagaggcttcctcttgcagtagacaagaaaagatagagagacccatagccagacattacacagaaagagtccttgaaatacacagctctaaattggatgactccattaaatccctccctcagaattcctgggaagaggaggtggaagagtataagagccagaggggatggagggcaccaggacaaggctctcaactgagcaaggctcacgtgaactcacagggactcaaacagaaagcacagagccagcatgggcctgcaccagggcctctgcatgtacattacagctttcagcttagtatttttatgggactcctgagagtgtaaatgagaggttctctgattcttgtgtctgctctattggctctttccttctgttgtgttgctgtgttcagcttcgatgagatggtttgagttttattttactttatttcgtcatacctggctgttatctcttagaagccagttcttttctaatgatagtcacaaagacagagaggagaggaagcagggaagactgggatgagtagatggaggggaaactaagattaggttatattgtatgagaaaagaatctacttacaatacaaggaaaaagaaaaggaaattgttgctaatcatagctttgtggctgccacaggctagtgcggtggcccacagggatgggtgagcaaggtgcacagtagggtaagcatatgttggaggtacgcatgagctgtgagtgacagagcgaggcataggcatcagtcctcacaactgacagccaagtggtgctaaccaacagtggaacctgacaggaaaactcacaaaattctgagaaggactgatgagaaaggcaaaaagagtgaaagtattccttaccataaaggagacaaagcatataagttcccttcaagggagaagctgactcagtgaagcagataaacccaaaaagatagacaaggagagaccatgggaatagcaacagcctccgggaagtgcatatttgctccccaactggggtgctttaatcagggtttggatttgatgaaggcagacaatgaacttggacagtgttacatgtgttcagcatcaagactactgaccatggctgcaaccttgacatcagaagaatgccttcttttattgagcttcaccatgaacaagaagcagcctcagtggtgatatgaggctctgtggctgagttcccaccaaaggagtgttttatgtgtattaattagcatgggagagaaaatgatgggtatcttgttttcagactctaggttgaccaatgacctgtagatgtaagtggcctctgtagttccttttcagtaccctttagccttctattccctccaatgctggatcaaaaacatcttcacacttgtgcaagtgtaaatttcaatcacatttggagaaaaaaatgcagtggaagatgccaaaaagcctggaaatatctattctgaagcagttgtctcctaactttaatcctatggctttagtcaatggcagtattactgggaaagtgttaaagaaccaaaattaatttgattatttttgtgggcctgggattgaacccaggacctctcacattctcaataagtagccaaccattgggctacatcccggttccccaaaattaaaccaagagtgaccagagttctattttcaacattcattttctccctgctattgatatgcaggatagaaattagaatttgaaaatcatttgcatataagagttgagatcagaaggagatgtctgggaaggataaattgatgtggcttggcatcttgccctgttggagccttccccaactgcatctctcacctttctgtcacttggaatgctaatcagtaagttcatttggagcagaatgtgtcctctgttgaaaattcacatatgttgcaaggttaagaagccaccattccctcatacctggaataaacatcataatcactggatccaggttcccagggtagtagtacggaagaggagtctgtatcagtaggaggaggggcccactggagaatgtggtgaaagaagatgagaagctcttttctggcattaaaaggaacttgtgtgtgtgtgtgtgtgtggctcatgggagcaatcctacagagaagggagtggaaactatggactttgcttctttcttttatctttaaaataatatttatatgtatagagatatatgataatatatacatagtttttttttattttgttgactcacagtggttgaacatatctgtggggtacagtgtgacatctctgatgggggatgtacttctgtatgctgtgactatatgtttctcttattggttgatgaataaagctgttttggccaatgggcaggcagaatttagctaggcaggctatccaaacaaagaggcagagagaaggaaaacagggtcaaagagacaccatgtagctgccatggaggcaggatgcaaggacatcacctaggaaagccaaagccatgtggtgatacacagattgatagacatgagttaataattaagagagagctggccattaagaagcctaagccaatggccaaacaattataactgatattgagcctcagagtggttatttcataagtggctacagggacctggtcggtggagagaaactggtccagtggaactgagatagatggagaaaatccccctttactgtatttcacgacttgataaacagttgtctacacttattccaggctctttaaccaatactctactctctacttatgtgaggtaactctttattttccacatgtaaatgagaacatgtggccctgtaactactttctgacgtcagttgtcttccacggaagggataccctctttgcttccttcctcattcatttcttgatttcttgttaccaatctccacaaaaccaaggtatttgctaaacaatttagcttgttttatgagaaaataggttccagtctgtaagtagaacactgtatcatagcccgtggattttctgaaatgcatgattgaccaatttacacaaaagagattacctctgcaaactcagtcactgagaaagtgacatttacacacttactcagagaatgttaaatatttgtccagctccagtacctctaaaggcaatgaggtgcttaaggagctttttataaaaggcttttaattaattgattaatttgtgtgtgtgtgtggtgaaaggagaaagcctgagacacaccctttataggcagttgtgagtccctcgatgtggatgctaacaactgaactgttttgttgtttataagacagtgagggctctaaatcatggacccatctccctagccccttaaggaacatttgtggctcctctgatccttatatgctgcagcacagagctctctattgcattagctcttgactcttgggagttactgctgctaccttgggaaataggagacatgtgtatatttcccccatgaaatcatgcacacaaaatcttgcatttattttcagagggttcataggaactccctacagactgaattgttcaggggttttaggctaaggattgctgttttagtgactggagggagaactggagggagcctatgaataaagggaaattcctgttttgcaatgggtgtggggtagggctggaggatccaaacgggctcagtgtatttaagattgtagcagtctggaaatcatttgaataaagagttgacatcagaaggagctgtttgggaagaattaattgatgtggcatcttactccttggcagcctccccaactttcatctcttgtctctctgtcattctacctggaacactaaccagtaagttcctttggatcagaatgtatcctctatggaaagttcacatatgttgcaaggttaaaaagccacagccccgtacatggaataaactcagtgagcactagcttatgtcaagcatgtctctgaagtcctgaccctccagggttcacctttggagtggcagggattacggtatagcctatgtgctttcaccaccccacttttagggtggtgaaacaaacccgggccttctgattgataggccaggatttttccctctgagctacatccccagcacccctatttattaaacgaataagactttattattcaaagactttttgttcctcctatataatacaaataaaaattgctagagagcctgtagtctaccctgtaggcccatcacatggggaatctgagaaggttccacagtactacaaaacaagaagactggctaccccctagaaatgtgtgtgtgtgtgtgtgtgtgtgtgtgtgtgtgtgtgtgtgtatagcaataacaattgaagaagaggccatgaatctgagaagcaatagtagggacacaagagaggcaagtaggaaggtagagtactaacatatgaaattgtaaaaaaaaaattaaatataaaagacagggttatgcgactgagcctagagttctccatttaggctataagaactggacagccaacccttgctatctgcctatgtctattttccagctcttagggtttcagcttctggtgcctgatcttgatgtggctgctctggctctgaacttacatggagagcacttcacatgctgagccatctctgcagcccctactttattctttattctctgcttccttaaatagtaagaagaagcaaggaaatgaaaactctgcaaggctgtccccttataagtatgctccccagatgtccgtgcctgtgggccagacccatatcactaactgtctcccagaagttgtctttgaaaacgtcttagttttatgtgtatgtgtgtgtgcctccttctctctgggtgcatcccatgtgcccacagaggtcagaagagggcattggatcccctggagctggactgacagtcacctgtgacccacctgatgtgagcactgggaaccaaggccaggactgctgagctgtagctccagctcccagaggttgccttgattccctcctggtaaccttcaatcttagacatttgactaatactcccttagacactttcattccttaaagtttcaatgattttcctggctcttaaaagtaggcaaatttctgaaaaaatatagtttgttataatcacatttttgaagtgatgaaaaaaatcatgcataagtttaaaaatattacggtatggaaatacacacaaacaatgaccttagtaatgtaaaactgcatagagaaacattcataataatgatatttatttaaaattctcagttattacctttattctctatatttctgtggttaaatattttatgattagaaaaacaatgcaattattgttgttaattttattagtttatggaagcttcatgtcctagctttgttacccagaactgtgtacagttagacacatctctcagcatctctcagagaggtaacaggtaaaacatattgtgtgtgtgtgtgtgtgtgtgtgtgtgtgtgtgtgtgtgtgttttgagacaggctttctctatgtaacagccctaactgtcctgaaactggctttgtagactggctggcctcgaactcacagagctccgcctgcttctgcctcctgcatgctgagattaaaggagtgcaccaccaggtccggccactcagtcagcttctttatgggaacaacgtaataccatttataaatgtgtaaagacatttatattttaatttccacagtaaatagggtactagtgctttcccatcctttctactgacatttcttttatgactgtggacataggagaccctaggcattacaattctccatttttagcagctaggagctagaaccttatgaccctgatatgaagaaatggaatcaaagtgacattcgcatttcgtcctatactcttttcaatctgtttccttgttctggttaggtgaagaaaagagacaactctggctgcatggttatgtgcttcaaatgacataattttgcatatataaatcattaactatgtcatgcatcacagtagaaggggtgttactgatgtctgctgtcttgacaaggaatgctctaaacaacattaccttcaagttccctttttctttcattgagtattgggagagcacaggaaaattgggcactgtgcttacatgattttcaaaggaattttagcttgcaacatgggggtagagggcatgcaagaatgccaaatagcaagagagtcctttctttccagggatctcaaagttgaaaacagagggctctttacaatgactttaacttgtccgtgctcatcagttagaatctataacttgtagaaagaaggtcttggtttaagattaattgttaataactaaggaaatgacattggatttgttacttagtgtcactgagaatttgtttccttttgcaaagtggtgctattaatagtgaccccagcaaagcttactttagtttcaaataagataattatgctgtttgttaaatataaagtggtatacagataacattgtcatcagttgcaataaaatatttttgagtgtttatttgtgttctttgtatatattagttcatttaatccaaacctcatgatttaggtattatccctttacttttctggaggatgaagcaagggcccgagtttccattcccaaatcacttggccagcattgaaagcatttcgtggaggagctgagatttaaagcaggcaaacaattctcaggcctgaatcatctttattcctagaacagtgatatttcaattgcctaagagtttcagaacctccaaaaaatatatatcagctatcccttgtgcgttggaagatggttttcattttttttaagaattaaaatattaattatgtgtatgcatgatgcatgtgtgtctctgtgtgggtatgcagatgtgagatggagttataggtggttctgagccaccctgtgtagtgctgggaacagaacccaggtcttctgcaagagcattatgcattctccatcactggcccttctctccagccctggcagacattttctaagaagctgtgcccttctgttacacaggcagccagtgcctataacttagatttggggtcttgccacccatctggaatacaagtttaactgaagccaggctctgtcatccttgtcaatctctagttgtacatctcacttaactgatacataccagtgcccagaggtaggatcttgcttaacagactgtgttttcagctttcgaggcttccgttaaagggatcactcaggtgttagctggcacaattaagctaacccaccctctgctcccttaaacggagtgctagtttctgcgcatgctctctctttctctgccgcgctcttcccatacaccataggacagaggactatttctgaactcatcacaccctccttgcccaggatttgtaagtgaagaaatatctgaactagttttctattgcagtgctgtgttgagtttgtgccttttggactgttcctgggcatgcctttctctgggatgccaggtgaagtaaggaggaaagtcgcaagttctggttcctactatcagatccaagtcaggcaacagccaccaagcatagcttcccaattgaatactttttttttcatagaagggaccctacaagagccatcaatagcatctgtctgcataaactgttttgtgtgtgtgtgggggggagagggttcctgcacacagggcaaactgctagctaggcctctggccctccaccaggtgaaagtatcctgtttaagacccacaggagatgcccatcccccttcatttctcttcagggcaggctaagtagctgctctcatactggaagcctgacttagtgaggggctttcaaaacattctctaactcactgaaagtgtttgaacttaagttattaaggtgaaattcagataacgtttaagtagttcagggatagttcattatctgtctctaaaacaaaaaaaattcccatttttttcccctaaactacgtagtactggtctgaagcttgatccacaactgaaaactattgtctcgctgataaaaggtttcttctcttgtacataagtcgcttatggggtgtctctggtcatgggagttgcataaaacttgtagaaggccattggcttgggctgagtgtttttgaacagggctccaaagatgaaatcagtatgggtatgattacagcaagtgagttttgcctggtttcaggaggtcctatagccaaggaactcagtaaatcataatcagttgttcatcgagctgtaatcaattgagtggctgactggccaaggtgcagtcaattaagttttctgtgcctggtgtctgttagcctaagattgtgaacagatgtgttgaagggtagtctgtgattttccctatttgtgagatcttgtttgtttttctttagtcaagcacaactaagcttaatttgactaaggaacttttttctctgccatcatttgatagaagatgtggagaaggaacttgagtgatagcctgccccagcatcaggtagcaggcacagccaccccgagtcctctgtgctcctatgtttttggctacacccaaggacagtgggtaagtactcttaattttttttgtttgtttttgtttttcgagacagggtttttctgtattgttttggaagctgtcctggaattcactctgtagactaggctggcctcgaactcacagagatccgcctgcttctgcctcctgagtgctggaaataaaggcgtgtgccaccaatgcccgtactcttaattttctggatttgtgtgtagagttttctgattatgcttgagcaaagctttgatctagaatgatgtgtttggaagtcacaatgcactggctagcactctgtaggagaggctgggtgtctggatcagacacaaagctaaagtgtgaggcagccaagtgaaaggaagtcatggatgttctgagtttcaaggagtctaggactccattgcctggagctctactctagggtagtttgtgctgaggaggagcatgtgacactggggcaggcactatgggtcactttgtggcatatggaggcttgctgcctcctggggtttggtggtgttgcttaggtaagacaaaaactacattgagtccagcatctggaatgttccagtttggaacgtcagtaaatttcatagatgagaatttctagaacctgtgatttatttttggagaactgggaggaaacagagaaccagaaataatttgcaatttcagtgactacaatttgaaatacttaatttgtgtcagtgactgtgcataaggctaactggctgtacaaaagtgatggcatggtttggctagggtggggggacgtggtcatgcggggaagacccaggttggtcctgcaatcttgcctcagccttctatgtgttgggatgggatgcattaaaaaaaaaaaggtacagaaaagcttcaagaggactaaatgaggaaaacacattatagaaatccatctctcaggtcacaaaagccatcagcttggaagtgaaaagaggcattctaacttggcatggaagatggttagcctgacctaccggttaggaattctgctctgaggtcagtcagttcagaaaacactggctggtcagggtaggagcctagcctatttttaccattttgagttctattttagtaaaagaggctttgaaggagggacatatcccatcacacactgagaggaggcaagggaaaatcactggaaatgtttccagtggagaaggcaaaaggattggtgtctatacagtaagccctatctttgaccagggtctgttgactctctcccttgctgaagtaagagaattggtgtgtgttggggaagtgtatcttcagagtaaatggtctagggcagtggttctcagccttttttttttcctcccagattttttatttaaattagaaacaaacatgttttacatgtcaatcccagttccctctcccttccttcccaccctgccccccaccaaccccctatcccaccttttttctgctccccagggagggtatggtcttccatgggggatcttcaaagtctgacatcatttggagcagggcctaggccctcccccatgtgtctaggctgagagagtatccctctatgtggaattggctcccaaagtccattcatacactagggataaatactgatccattgccagaggcaccatagattgcccaggcctcctaactgaaccagaataggttctcaaccttcttaatgctttgatactttaatatagttcctcaagttgtggtgaccaccaaccatgaaattattttgttgctacttcataactgtaattttgctactattatgaatcatctccattgtgactcactgaataactgtaatggcaccaataactgaatgcatctaggagccacacactttgccaacattccttaaacatgttgactcttaactctcccagcagtctgggatggaagtactgatggtgactgggaatattcacatgatgctgaggctccagttttccaggttacgctaaccatcttgttaatgatatgagtcttgcatgtgtctatttttgtaagcaacagacattttggaatttgagtttgttccccacataggtcagacctatcttcagcaggagaggggactgctttagaggttatgcttgcttgactttgatgcatctgtgaaaggaagggtagagttgccttcattttcctaaaagagagacttgtccttgaatgccagcaccatcttctgccctcatagaaacagttgcttttgttgcacaggatgatgatggcatttgggtatcaggaaactcatgtataaggcatagagaacagtcttatccagtgtctaggggagattcatcatccccagaggccaggactcttgtagagcgcaggaagacatgtaacatctggattcatcttagctttgcatttggttgggggatattggacttgaagagcccacagacaatccttaatcttctagtagattgatgtttactgagtttggaaaaaaaatgaaaatgtggtctggatcaaaatggagtataacagattgcagaacccagtgagattactgtcactctattttaaagctgaggtcctgagaatcagtgctggttaagccactacagcataaagccaggatggaatccaggtgtgtctgcttctagagcttgctccttatagtcaccagattagatggctgcccacaggtcaacagaccaaaacagatggcccgaatcaaatctaggtcagaaactaaatctgcaactccccaaggagatgtgctcttgttagcagagatcttatgaactatgtggattgcaagcattattcccaacctgagttttttcattcagtaattcagtaagcaaatatttgttgagtatcttctatgtatatactgtggcactaggaacaattaagcctgagtgagtgtagggaaaatggaataatgaataaaatgtgggtttggctcttaagagcttattacttatatataatcttatgtatctctttataaatatagatattatataaatatatgacaatgaagatacagataagggacttaagagttaaatgtatttcaggtgtgtgtgtgtgtgtgtgtgtgagagagagagagagagagagagagagagagagagagagagagagagagagagagagagagagattgggggagcaagaagagcaggaggaagaggggaggacctggtgttgactgtggtaaatgagagtgctccacttacgaaacatgtaaggaattaagaaataaaaacaaataggatgtcagaaagcattcataaagaatgaatggattttcagactgaactgtaggaaagcatcagtcggcaaggagaatctggcattattttagcaaggagccagcacaactccatctgttggtgaagttctgttaatgacttgtttttctgttcagaatggctttagttttacagggttgttgaggagcaaagatatagaggatgcctggtacgcaaaaccttaaatactctctactctttatggaaatttgccaatccgtgcagtactgtataggcagggatagtggatcaccaaccaaggaagcatgagggtctgagttcgggtgtagaatgcagatgatgagactggggatttgtgcattcacacctagtcttattgcagcagaagttataatagcaaacaaaaggaaagaaccagcagtcaatctgtgataaatatcagcttatggagctgggaaggaaagggtggaaaatggaaggcgaaagtgagtttaagaagtgcaaagaaaatggaaaatagagagtctaaattagacccatagaagtttcagagagaagagaaaattgaatgccaaggacttgagagaagtgtctgaaaaggagacaaaatggtgatctaatgtccttgcttccatttactccactggcacattgcttttagctttactttttgagaacttcatacatgaacaccacaactacatccctcttgagccccgttcctgcctcttatcagcacattttgtatgtccttgccttactttcccaccctacccaagggagactgtgatgccaatgcagtgctacagattcagctgggatgagtagcccatcagttgagcttatctgattgtgtatccattatgttctaagttaaaggtagatataatgtgcctttccccatactacccttacagtctttactagcagatgtctctatgattgctgtgctctgaatatttgtgacctgccctccacatctcgtatattgaatcttagtcacagacatgatggtgtcaccaagtgcggtgcctgtgagcttcttcaatcatcaaggcttcagaacccttgtgaatgggattagtgtcctcagaaatgtgttctgaagaagcttgcttgcccctgccatcctgtggagactcagcaagaagccatcatatatgagaaagtccctaccagattcccagtcttctggtaccttgctctgaaatttaccaccttccaaaactttaagcaataaacttggtttataagccccttactcaggtgcagtctaaattaatcaagattggacagtagtccttagatgctttttaactgataatgtttaaggaaaaattggttcatttttattcctgtccatcctaatttgataaactggataaatgccccaataccattttactgcttattgattttagaaccattgctgcaaatgagaactggctaggtctccagtaaacaactgaaaaccaaattaaactattggttaccttcattattctcaaaactgtagaagtaagaaataatagttacgtaattactacaattcttgaagcttttcaccaaaatcatgtgatgaagtaggaaaactgcatagttctctagatttcgagataagaatacaattcagattccccctaccctgtaaaactcctaatcaagtagtgctaggaagtcatcttggacacagcagtaaatgactttgaagtcattaatcttttatataattttttatcttccaacataaacatggagtcacattttgcctttatgggggaaatttggtgtatgaatgctttgagaaaaatgtcatgaacaagatgcatttattcctgatgtagactcaatgggtcattattaaaatcaacctcacaggctcactctcctgccactgctgtcagattctcatttaaaacacgggctatttaatccaggcgatcacaaagactgctagagggtacacatagtaaactgtgtaaggcacccaatatgagctgtgatgcagaccactttccaccacaagcagcttagaaacaggctacaaggcaactgtaatctattccctatccttttgtgttggaattatactcaacagttatgagatgtcccaactggatgctcttagctgcatataatttgaacaagtggaaacaacagcagaatggtttgttttgactaagggaactgggaatgtgggaagcccgaactacttgatggaaggcagggtggcaaagggaagtgatcacgtggtaacaatatgcccagcttcatccagaataaaaaagtacaccaggttagacattgtgaagatagccaaggaaggggatggcaaaatctgaacccaggctcccaaaaggtgaaggtaggagcagatgtagaaagcttaaaggaggggagaaaggttttcttcccaagatcaggggaaacaatccacatggtcctagtgcagaaaatgagaatacgggctactggctatagtcaggcaaagcaggcaaacaccagagacaatgacaaaagaacaccaagacaatttggcaatgactggctggggtggcagtgttgagagaaaagaggaggagctgaagctcacaggacagtggaaatggtatgagacacagggggtggggcattatggaggtggaggggtgggctttttagggaattggggagactgatgttttcttgacactaaaaatttgaagtaacaatggaaagctaagcagggcatgcaaagcaagtttcaattatgtttgtggagacaaggagagagaggttaaggccagaaatacagttttatgaataacatccaaacaggttattgttgaaaccagcaagaagtgtaagttattataggaggctcagcaggtgagactgtctcattgactgaataaaatgtaaaagaagtttatttagggcaaacagctcacagcacatgcaaataggacaagctaactatattagctctgtttaaatggtattaaaaatgaaagcaatatatcatgcaaaatgcacctaacagtaagaaatggaaagattggaaatggaaaaaaagggcacaggcactttcattttcagggaagtatgaactgagagaagagctgaaatgcaaggcagggacattgtcaagaatgaataaggctgttgaagaatggcggacaatgattcactaggaaatacagccaattgtagaatcttatgagcctgggaacacaatctcaaaacacataaaggaaaaatttgacaatttcaaggagaaattgatgcaatctcccacggtagaagattttaaattctctttaaaatggcacaaaggaaaaataaaaaaaaagtttaaaaaaaacttcacatgttatggcttcaatgggtgaaaggcacgagaaagggaagggaaagaggagaagaaaagagaagggaaaataaaagttaaggatgagaggaaaacggtgccattgaaggactggcaaatcgggaataaaggtggaaccccacagatggtgtaacaaagaaggttattgttaaaaaaaaaaaaaccaagtacccttcctagggcaagatcgcagaggaagtatgatatgagggtgtgtggggcccatgttgggagaaccatgttagaataaccctcctttgatacagatacaaaaggaagaaacatagatggggatattttgcgatggaggggaaacaaatgggcaagtttatggaccttgatgtctctcgaaggcaggcctctgctgaatacaaggagatgagtcatcagggcacttgctattcccatctagtagtgtccatgcatgcagatttggcaattcaactttaaaattcatgtctgagcagagggcaaaaccaatcctgggggaaggctgctttctatggaggagatactattttcttacaagatgacagcttttgaataagcaaaggagaaatgaatttcaagaactatatgaagctagtagaatgtacaatacctctgagatgatgccaacagggctgccccaaccactggaagcatcaatggacccatctgtatatgtgttagaatgtacagggctgcctcacctgccggaaacatcaacagacccatctacatatgcgtttctagtgctgctctttactgtgtgagataactggctgtggccaggagcatgatgttgcattagccatagaactgggagctttggctgaattggttagatttgccttaaaaaattatatctcatggagttttaaaagtcaatcaaagggcagctgaagtataagaaggaagagggatttcacctcacagtgtcttgtttgttccgtgtgccatgtgctgcagcctggtgagtggggtttacttgacacaagaccctcccaactggctcttccagattgtaggtggacaccttacctctaaatgaagtgatgccacaaagagaaattactacccgctgttcctctcatttgcaaaacatctagtactggccacattgtccctcagaaatggaaatcatttaaattaagtacgactttatggatccctaacatttctgcccatatgtggagagatgagcacttactgcttgctcagaatgcatttccttagtctgaggtaggagtgtgtcacatttcttactttgcctagaaatgcactcaaccttttcctcagggctttatgatgaaatgacaattatccagtagaatcctacaggacagtctcataaaataccctgacaagtccatctagtatcatttagttttataacctctaatggctacttagaatgtttgctagaactgcctttctaggaaatttcaaagctactgaaaattccagtcatggtgagggctcatcattagctttggcttcggcatctaaaaactgttggaactcagaagaactcttatgtctcgtggaaggaacaagcatggcagtcttgtggccatggactctaacagcttgtttggcatccctatgccagatggcagggtatgcacttggacatatagatattcaggaattagaggtgtctccagtttctctgttgtcatcccaagcctggaagcttctggaagccttgattgacaaaggtatgtagatgtcttctaagaatgccttgcttactgaacatgttaatttcatttaaacatttggttgccttcattaccatctcagttgatctttgagaattgttcgtttcctgagagcctgatgggaatcttcccagagtgggaaattcactgtcagtttggataagacaactgttgaataaaaatgcttcccacagtgactatcactggtttttgcatctcatttcctcattattcaccaagtgagtctcaacttcctcaagtgcaaggtaaaggtaaagcaccatttattgctcttactgggagagttgcaaagatcacctgtgttaatagacaggaagactcagctctttgcctggctccttagtattggctcatgtgatttctctttactctgccagagagtctcctgttactccacatttggagaacactttgaactgacaaaagaaacttgtaagcagcatctagacagcactctaggaacttcacagagatgttccagagcttctgaggtacttgatatgttttctatctgtacaatttaacataccaacttggacgctgtgtcactaaagatgtggtgacaagaaacacctagtgactctcagcttacaagcaaagtgtaaccccacaactaagataggctcaactgaacatcaccaggaggaaaccaattatatattcttcatggttcatttggttgaagtatttaggtgaactgaaaacaggaaaaatgtgggaagcctggctatgaacactacacacacttcattagagccaacactgaaaaatccgtgagttctggagccagtggtacctctggaggactgtgaaagtaaggccaggaggagaaaaggaaacaggatgaagcaaacatttgggaacatggagagtgccctgccacctacagggttgacataccagttccttcttcttcatgcattccatgaggatgatgaacaggtgctgagcttgggtgcgagtgtacgtgaaagtcttctggattgtcaccaagagctggtccctcaaagattcattgataagtctgcaaggaaaaccaaggccaatcaggtcaacagaactcctagtcagtgtgtgtgtgtgtgtgtgtgtgtgtgtgtgtgtgtgtgtgtgtgtgtgtgtattgtagtttatcttaatttacacataattgctaatagttgatagggtgaagtttcaatatactagggactatgggataataaaatcaagatatttaccacatcttgcaccttatatttatcatttctttgttgtgataacactcaaaacccttccttctagctatttcaaaatacccaacacagtgtagggtatttcaaaatagcctacagtgcagctggaacactatggaacatgagagagcactgaggatttatttttaatcagttatacttcttcctatgtttcccccacaatatctgttgttttgaatgtgataatttacaaagtagtgcatttaaaaataaattcaagtctcagaacctcacagggtgaaattggaagtggacttagttacttgttaccattttcccttacccgtagtcatgtgtttagtgcctactacctcaaattctgctattaaagatgccttcaattgcattatctacattttggaaagggtttgctgtgtcatttccccacaaactgtaatattataactaattattggaagaaaagttacatctcagcaacacagttttcagcatccatttaatacatggacatcagtaaaatgcttattatacaaataggaagactggagtttgatccccagcacccttgtaaaagctaggtgtggtacacacctttgtaatcccagcactggaaaggcagacacagaagaatcccaagggctagcgtaatcagcaagtcctaggtcccaatgtgaggctgtctacaaaatgaaggtgggtggctcctcaggagtgacactccaggttgacctctggcttccacatacacatgtatgtatacacagacacacatgtgcacatgtattccctcacagaaacaggcacccccccaagtggaaacaggagttaggttactactttaagagttttaatttgttttaaaaattaaaaagaggttttactctttttttttttttttgtagtgagccaaagtgggattgataagcagcattcccaaagctcagtactgtttacttcagtgtgccccatcagtgcacactcaggtctcagctactaaatcttaattcctctcaccagcctggtgagaaaggcatctgtcagccatcaaatggcaagggcgtgaaaatgtattttgctatgaagagataactgttcaaaattgggaggatgaaaatctttttgaagacactggtaaaataatattttctgcctaacacttgtacattttatacattacacattgctttcattactgaggtatcagcaactcctagataagataagaaagaatattatttcatttcatactggcaggaaccccataggctaaagatttgcttaatttttttacttggtatttctccttatatgaaataatatgaaataggcaagctcaaaggaatagaaagttactagacattgtgaatgaccatggagaaaggttagagtgcttgcctgacattcccagggtttgatccccaacactgtatttttgctttgtttggttttcaggaattgttattggctatgcatggtagtgcatgcctgtaatcctgcacttgggagagagacattccagaccaacctggtctatacagtgaattacatgctatattgagaggttgtgtctcagggagagggaagaaattagtgttagttctatgtaagaagtcaatagatagatgaaccagctgactcagtgggtaaaatctcctgccaccaagcctttcaacctgagttcactccctgggacccaagtggtggatagaaggaatggctacctccatatatacattgtatgtacacacacacacacacacacacacacacacacattgtacccacacatgcacacaaaacaagtgtaattttagataatctttcattcctagctcttataatggtaaaaatataaacaatagcattaaaaatccaacagataaagggctacatattctctaacattctcagaattctcaaaactccaggggatcctctccttccatcttgtttgggcagggttcctctggtttcctctactgtgctgtatgcttcaagtgtagctggcccaggagcttctggccacatctccccatagagatgctggaattccagatgctaactaaaactttttgtggagatctagctgagcatgccaggcttgcagagaggcactttgaacattgggaaccatctcctcaagctcccaaagtcactttttaaaaccagtctcgagtctgagtgaaaacacacatatacgataaaactaaaggcttcagttaagtccctttaccttacatacactacagaagagctaatatttatgaatggcattcctcatagtgttccagtatagtgttcatcctaattacagcgcaccctttcactgaagggaactcgtgcagtaatttgtatggtcatttcacttgggactctttgtttgatagattctgcacttgtttatatttcatttctttctcactagctctgaggtatgcacatgtctttctgtcttttgtttgcagctgaagaacccacctctaaagcccgactgacagaagtccagtatagcctcagggacacagtgacattggttgggaatttgttacagtccaaacattcttctgagacatttataaatgtattaactcatgtaatcctcaaaaaaaaaaaaatgctagaaggaaaagctcttgtaggcgagaacgtggtccatgtgttaagtctgtttcttcccagtctcctcttgagagctgactttctaagcactgctcaggtccaggtccatcgatgccacaggtctctaatgcacccttcccagcatctcaagatggctgctatagcagcctaactgtctgccaccagtttcaccttgccccagtctgttctctaccctgccagtggaacattgtagaagtgggacttgctggtacaaagaccaaaacaatcaaatggcactgctgccctgagggtagcatctgtttctctcagctttgccttgcttccttttccatacagcttcagagattcagttcattgtcatcacggtggggaacatggcaacatgcaggcagatgtggagctagctacattttggcttgtaggcaacaggaagttgactcagatttgcttaattttataagcatggattttagccagactaagcccaaaacttagatccacacagtcagtaagcaatgacaatagctgaatccagtgctctcttccatgctatgatgctgcctctctgtgcagcatgtgctccacactattgcctctcttcaatgctgtggccactacagcagacagctgtgagccttccacaggaaagcagggcaagaatcttgagaatacctttctatgagtggcctgctatgccccagataggcatggttcccatgagcacagagggctgttcactgtggtacccttcctttgaaaaaggtgtaaagtccaaggatcctgaaagctcgtcatctgaggatcagaaggttgggtcaacttacattcactcctccctcaggaagaatacatgtgtgtcaaaagacatacatgcttacagaaaagaaggctcagatgaggatgagaagtgacatctcaaatattctcctgatattatgtaattctggatggctcaatggccttagcaccaaatcagcttgaaatcttccatatgttcgcctgtctatccatccacccacccatctattcatctatctatccatccactctaccacccacccactcacccacctaccaacccatccacctttctgtccatccaccatccatccatctaccacccacccatcctaccatccatccatccatccacccacccatccaccattcactcatttagaaaattcatatggatgtctgcttggtggtagacactgtggtatgtgtcagggatatatggatagatgcagtatggtcactcttagccctcagtggagtagaaagacatcaattaggcattcagccacaactgtcagtggtagagaagtagaggagctggtgagagtgacttggtgaaacctgaggagatggagctttacctgatacctggagaggagcactagaaagggttgaagatgataaggatgggaaagaacagacaaaatggcaatggataggcttggtttggagaagagagaagagggccctatgggtagagcttgtgagcactatagtttagatacaaaatgacccctaaaggtctctctgataaaggtgtggcctcagtttagtgctagtgggagttggtagaatctcaaagaagtgatttgaatgaaaatgtcccttacaggctcagctgtctgagcacttggtccccagttggtgcctgtttgggtaggtttaagggtcatggggcttgccagaggaagtatgtcaccagggttggattttgaggtatcaagccacatcctgcatgctgtctctgcttcctgcttgtgacttaagatgtgagcttttagtttcagctcctgctgccatgtctgctgtctgctgtctgctgcctcctccctgccatggtggactcttaatactttggaactgtaatcttcaaataaacccttttcttctataagttgccttggtcctggggatttatcttagccacagaaaaggaactactatggaaacactgcttaaggttttgagatgctgggagtgtgccctcaaggggatctaggctgtttcatgtcccagtcaggttagatggctttgatctgttccatgtccctgctaagatctgtcaccacaccaatgagccaattatttatacattcaaatgtgcaaaactgtgcctccccaaatccttttttcctctataaggtgattatttcagttgttacaataactaaaggttattgtggagaacaaattaaaaggtaagacaaggtgaggctacagagagggttagccatgacaagatcatgggggcctctgggggcctttggagactatgctagagtttatttagtttttgacatatggtcttactatatacccaggctagcttcaaattcacaattctcctgcttttaccttaaaagtgctagaattacagagtgccaccatgtcttgtgagatctgtggctttgttcctacagtggtgagaagtgtttcatcaggagagagagacccatttctatttgtggtgctaattaattctcctaagactcaaggcatgaacagtcatacctggtcatatgtctacttgacaggcaacccaagggggtaagtccagagagttctgcaatatcaaaagtgtataatgtagcacatgattgactacagaagggattcttctggttagccacttgataggtccaatcattcatcggcaggtgtttaattttgataacaactcaaaatttgttctctactgccagccatctgtaatgaaatctgaattccctgatgtcattaactgtttgagagagctgtctgtcacttccatccagtctgccagtttgtgaactaaagaatgatgtatgacttagccacagctttcactagctaggtgagctgaacgactcacccaagagttctatagtttctgagtcctactttgtatatgaccaaaatggtggctttggatcaatcagctagcaagaaaaacatacaattggagcaacaggttagagctacaaagtagagaggctcatcactgatggaacagagaaaatggaggagagagccatcacacatgggatggagatgattgaggaagcaaaggtgacttggtccatctgaaacatcatgtgtcacatttgccaaacttcaactctgcttcgttttttttccccctccacacccttctgattagagcaaaagaaaatattatttgtgctctgtctctgctgttcaaagctccccattgttgccagtttctcctcttaacagagaaatagcatatcggaagctcatatgcctttggctgaagaggtttaatgacatcctgtaagagcaatccttattacatttcctgtattcttagcacctcctggtttaccacactccatgggagaaatggaagaatgatccatgtgaggcaggcaggtggtctattttgcagaagaagaaactggtaaaggtcctggagtgatctgtcagataacccagtgacatcagtgtctggactgactgtatttctttcactcttgtcccatgatgctagttctcctgtatcttacattattctctcactcagtttcctaatcatgtgcatcacagggaaaaatgtaaactcaattagtgattagaaaaatgcttttcctctatatatgtgtgtatatgtatatatgtataatggacagacagagacagccggagaggggagagagagaatgggaaaatgaaaaggttggaagtgttctgactggcttcgggaagatgagtctaagtgaggtctgataaaagaagacatggacagagcattcagaagcttgcaggttttgcaggctttagactctcctctaggtacttctttgttgagcatctgacccctgtttgtgacagcagttcactctgtttccctgacttactttgtgcatacacattttagtgtctctaagaagcttgctttcttgaaattctgatttttttttagttcttccaattttcccctactctacagcactggagaggagagactgaaagcctttttaccatgatatttgaacatcaatggatttagagacaaccccttgttagacttctttttatggcactagagtagtgattgaaaacttcttgacatcaaaacatggttgtagtattacatgaaactgtagctttagaactgggtctgtgacagagtgacttatttatagaaaccactaatttgtggctccatacgtatccgtgttattttgggtacacctcaaattagagggtttttttcggttgaggaaaatctctgcactgtggcatttgtggttccatttaaatgctatgtgtatggtctgtagtctttttttttttagacaagatgcatagtaatttaaaataggtcagtgtttacccagggctcaggatagccagcaacatgccccatactttgcaattagtgttctattcaaatgctgtgaatccagcccacatgtagaaatacttctcccagaataaatgtaattatctgcaatatcaatttttgttcctagatttgaaaattaaaagagggatctagaattcagtgagactccaagagctaatcttaggttaattaacagctttcgaggagcacagtcctcccgagacccctgcagatgctgtgagatgctgcagacacagtgtgagaaattttacttatataaataaaactgtgaatacccacatttggtacttaaaagacatcatttccaatggcatctctagtttactaagaaaacagaaattttgtcatttatttgaagctaaagcaaatgcctaaatgttatataaaggacactcaaagttgtccttgaatgaggtcatagagaatggcaatctctgattgctcctcttctctttaattttcctgtccccttctttttgataaaagctagcactttctttcaaatgttatacctctgttgccataagtataggatggacagcctttaataggctctcaccttctgactgtgtgatcttaagacttacttagcccttatttatctctttcatatacgtaacatggaagtgataaagcctatttccaagacatgcgaattaaacaagtctacctaataaagggcctggtgtgtgactgcctttgtgagcacttgctgttatccagatcttattatggtgtcctttagagaagagtcattggtagattcctttctgttaactaaaagggcctttgacggcagctggtcttgaattataagtttcaaagagaaataattttccaacttgagagaaattaaggagctgcagcagtgcttgctttcttttgagaaattgagatatttacatttatggaagcttaattaaatggaactttgcaaacacgccatgcagacatttgcatgttcattcttccatccattcactcattccacaaatcatgcctatgcatgttactgccatgctttatcttaagagtgggttgagagatgagtactactcagtcttagcatcaaggagctagtagtgttattccctcttgagtagctgatgtggtaagaaccacgtgtccttaaaagtggccacctaaacccagtcacaaaaagacaaacatggtatgtactcaatcatatatggatttttagacatatagcaaaggatcaccagcctacaatccacacctcaagagaagctaggaaacaagaaggaccctaagagacacatacatggtcccacagagaaggggcaagtgacaagatctcctgagcaaattgggagcatgtagggaggggagagggagttaggagaaagagaagaggagagggaaggagttcatgagggagcaggaagattgagtcagggggaaaatagaggagagcaagaaaagagataccataatagagggagccattataggtttaaagagaaatctggcactacggaaatgttcagagatctacaaggatgaccccaactaagaatctaagcaatagtggagaggctaccttaaatgcccttcccctataatgagattgatgactaccttatatgccatcctagagccttcatctagtagctgatggaagcagaagcagacacccacagctaagcactgagccaaactcctggaatccagttgaagagagagaggagtgatgagcaaaggggtcaataccaggctggggaaacccacagaaacagctgacctgaacaaaggggagctcgtggaccccagactaataactgtcaaaccaggacccctgaacatgggtgtcagttaggaggcctggacagtctaaggggcctctggtagtatatcagtatttatccctagtgtctgaatggactttgggagccaattccacatagagggatactctctcagcctagacacacgggggagggcctaggcccggccccaaatgatgtgacagactttgatgatctccaatagaaggcctcaccctccctggggagcagaaaggggatggggagggaggttggtgggggaaatgggagggtgggaaggagagggaactgggattgatatgtaaaataagatggtttctaatttaaataaaaaaggcaaaaaagtggccacctaaccactcatatttctaaaatactgctacttagttctgtgcatatatccttcaaccttccttttgattaagtgattatctatatttatttggtagtcatagtaccaggtattgcctttgtcacttaagcagagaccattttctagggataacattctcatacttttatccctgtcaaaagctgtatgtaatggacagttgcagtaaaatctgtgcagctttaaatgtgcagtaaaatcttgggccagctttaaatgaccagggcaagtcatcaaaaactggattgtttctctaagggtgtttatttcacattggggtctgcttggggtggcaaggcaacaatagctttagtaacccctgttagaaatgctggcacagagagatctgagttcctgaacgactgtaccaggtaacctcatcccttgggttgggcctgccctatcttactcatctggaataaaatgattgccagttgacttcttccgtatcctcctccagtccaccctccgtggcattggttaaatagctcttctgtagagggatcatgctctagaacacttttaaaattctgcaatagctccccattaccagccagatggcattttaatttatgtatgtcatttaagatttatctgtggtctgtcccctaaactaggctcttttctgtcttctttatatatttcccataaatatagaaccttccaagccaactggcctcttgtatgcctctgtgtccttgaatgtgctctatctactgtacggattagtctcttctaaaatctctactcaaagcctgtttaaactcagttgaaactaccccttctgtgaaaatctctgattactacttactagatgctctgggagaagactgttttattctcataatgcttagggcagttattcataataatgctcaccatctgaagatactcagcatttcagggataccaaggtaatttcccacacacagaacttagcagctttggcaggtggaagtaattttattacagaagtatatgtatatgtatatgtatatgtatatgtatatgtatatgtatatgtatatgtatatgtatatgtatatgtatctatctatatataattggtaggagatgaagtgatgaaattaaaagacttcaatatggtgcctctcattggaatccatttcctttctttcctattgaggactctgaaatagattatgcggctctttcagtcgctatctcctcatttgttagcagatctagtatatgtcctgaaaattgatgtttttaggtcaaaaggtcatgtgtgaaaaattaggaattttttactgagaatttttcacaccttcagaggagtcctagtgaaacccagctcagagctgaaacaaggcaactagcatgtagaccagccacacggtgaagagacagtggaatgttgccatgactgttggatgaaacaagtctttgagaaggcaaagcaccattgaaaaccatttagccaagctttcaatgggggaaatccaggatcacactgatcaggtgacatggaagtaggctggtaatgagaaggttcccagaactaatcttatgtcattttgaagtcaaacaggtggggatcaaaactcacgaaactatttcctgatttacctggaagattctgctggatggatttgaagttggaataaaggaatgattcaacattaatcattttaggcatgggaaaaatgtgaggtctacagagattaactgacttccttaacagtacagagcttgtgagagccagatgggtaggaagacaaaagtgaggagggaagactctgataataatttatgctaacttccatgtacaggctcacttcagtttattgatgaaaggcttgtgatttgtttaaacggctcaatgcaagtgttatcttctgctacatacacgaggatgctctgtagtctatgtatgagaagattcagtcatgtgacttcaggaatccactgttcccagtggtatttcttgtttttatcagttgctcaaagttccttaaattaactgaaagacacataaatattcaacaagtagaatctctaagagcaactctgctgctctttttcagaaaaggatggttaaataggaagttggtatagattgaatggaacacaggtactggttggctagattgttttgtcactgaaaatcgaacctagctacaaaacggtctctatcaattaagaaaaatagcaattctgatcttggcttaatgtctagtctagaataaaatgttcatctggcctattactgatggttctatctacttaggaggtaaaacttagagaaactgcctattatggggcaagacatatgtatattggtagtttcattattgcttcccacagagggaccatttcctatttaaccctcactcctgaactccaaaatctggagccatgtatggtaacattgaaggcacaggcatatgtaccgaaggaaacacaattgagtggcatggtggggttgagagtggcaagtgagcaattgatacttatgataagaataagctttgtactctgtgttttataagtggcctttcataaaaccacctagactctaagctccttccttggctgtttggatggcatgttcactcctccctttctctgtatttgtattcactcctcactttctctggagtgccaacttagtgatgatagacatcttttccactttgtttttgtgttgatcccataactttgtgcaccccacatgcaccttctaaagtactgtttattattattattattattattattattattattatctgtctatttaactctgctagactctaagcttcactagggtagggcattttgttcttttggctcccttgtgtatttttgccagtgcctgggctagggcttacactataatagttattcaaaatatatttctcaaatgaataactaatattgaatgaaatatcaaatgacacaggaaatctatcagaattcaagcatttctagttggtaaaaacccactgctaaatgaagaactgtggtattgagtgtggttatcattggctgtgagggaccattaaagttaattataatttatttttgcagccataacccaagtgttcagggcctgtctgtttaatagatggcagaggcaggtactgccatcccaagaagttttgttgcacagcattgttcttgaagttaacagcattgccaaatgttctactttgggctagggctagggctagggctagggctagggctagggctagggctagggctagggctagggctagggctagggctagggctagggctagggctagggctagggctagggctagggctagggctagggctagggctagggctagtaggatatttaagtataaaactccaaacagtgctggcttggtttgtgtcattttccctcctcttttgcctgtggttatgagtgtgcccaagagtgaaaaggaagcattccaaggaatacagaaaccaccacatggtcgggcagattttctgccaaaactgtaagtcaagcaatatactcttgagttcattccaagtaaaaccgatcagtgaatgccacctgtagccaggctagggggatggtcagtagttttaggccctgcattaaagttagaatcagtgctggcttaaggagtatatggagtcccctggggagctcaaactgtggccacaactccaatggatgcacattaaatgttggctctggttatcttcagaggaaaagttaactagcatgtgagagaagaagaaagctggatgcattctacttccttgtctgaaataactcagatctgggacaagcaagataagccttctgcagtcactggcccatcttctaggatacaatatggcattggtgttaagagtgtaatttgagttccagcttgcctgggaagaccatggtgctacgaggagaaagttagcaaatgacatgacactttcaccctaatttccttatttctacagtgggataaataccatagttatctcattttacaaaataacatatttaggtcaagtttttgcatgtagaagctttgcagtgatatataagagatacattcatgtttatagatacaattaactccagtgtatcaaggatgttgttgaagataggggcaaaggggctggagaagagtaatgctatgttatgtctctaggtagtgtgtcagattactccttcttaccctgtttttcttctttcagatggtgggataatgtaagttttctttatttttgttgaatagtctatgctggactaattccttgcttaaaaatttcaaacaacttattttattttatgcatatgaatttttgcctgcatatattaatgcataccatgtgcattcctggtacctgaagagattagaagagggcatcaggagtcaaagatagttgggagataccacatggatgctgagagatgaaactggtcctctgcaagagcctcaagtgttcttaactgcagagctctctctccagtccttaattcctacttttaaaaaattctatttcttatatattatcaatagtaacctgtgtagtcaccctgttcctcattccatttctaactcattcccagtagtgactttctggtccttcatctcccatgccttatccttgtatagaaatccttacctagccagatgattgaagcactcatatgttttggcatattggtcaaaaagcaactgcttcctctctcccaagtatctttttggtaacttgggttcttttctcattgttcagataattcgacatactacttgctactcatctcacagatatgagggtacttataagagtatcgctttattcaagtgccagtagacatttgcaacacatggactgactgtgaggtactctctttgcgcagtttcattgttaatctatcatattaggtcctttcatcagagccaagatgtagccttaaagtcattctcagtgcatttcaggaagccatcactaactgatctgagttggcactcaagaggaaaatggcttgtgattcttgtaccagcaatgataaaactgaaacactatcaaaagatgaaaactaaggtggtcacaggctcacagaaatccaaatcttaggcctgtccccaaaacactgaattatgactaccatgggcttataggaatagattcttcaatgcttatccaagatgtataggagtgtttctttgtgatgaagagttgggttacataaactatccaaagaatgtataataagcatgaatatccactcagtagtgtaggaaaggcttcactgaaaccaaatggagaggcttttgtttcttgtttcttttgtcaagattagtagatgtatcattggattctactctcaatacattttttcctcttttctgtcaaagagagctttacagcaggttgtcagtgctgtatacagtgtatgaaaattctatggtccatgatcaatctgataattccatgtcaattctgggtgaaatctattaagaacattccagacatttattattagtggtgtctttggtggcaagttaaactagggtagcaacagctgtagggtcaaatatctgttaagatgcttcagaattgacttcttctaaaggacagggattaaattcaaggtcattttgtttaggtattcattagttcatttatttattttatgagtatggctgtttttgcctgcatgtatatctgtatttgatacctgtggaggccagaaggacacaaaattgggggaatggggaagttaagtgtggatctaggcatacttaggggaggagtatatgatgaatttgttcaaaatacattgaatgaaattctcaaagaattaataaaaagtacttatttttaaaaaatgaaaaccaagcatatggaaggtcgggactatagtgtttctcccggataactactacatcagtgacaagtgaggtgtgatggtgtccatactgatctaaatgcttgtattactgtctgtaatttcctcctcacccacagcatttccccctcaaatactgcttttctcaccttttcccattttggccaccttttaaaattggccatgtgttttcactagtcagaatacactttgaagggaaccaataagagtagaggcagagagtctgggcaggggaggcaagaggggagatgaattacaacaaatagtgacacatacaggtacatatacatatatgaaaacgccatgaaaaccaacttaaaaataaaaaaccccagtaattagcaaaagagagggaatgaaggacacagttgctcttaagaaatctatgtaaataaaagtactaagagctaaaagtcccatcaaattgagtattttaacaataaaactgtcttgtaggggaggattttcaaatctgattagaacaaggcacagcagggggaggaggcaattcaaggtcaacacacttttggattcaaatgggttctgaagaccgagagtggcagcaggtgcaaagtgcctgtgccaatggtctagtgacctgaagagattgtgcaccaggcacagataccgcagaagctacttttgaaaacactagatgtatcagagaaatttaatcttcatatactctaaatcattcttagggaagtggggtgcatggattattctcattgggattaagtggagtacatgtgttcttatcagtgggatcatctgtggttctggttttaaacagtttttgagctctgtgttcagtccatctaatcggtatggaaaggtgtttggttagtagacgcctttgagatctttccctgtatcgacgggtattctggcaactgtggacaagagttctcctccataatggtttgcccagataccttctgatgatgttggctcttcaggttcaatgacacattttcccagggagccaagaattaggcaattttaaagcatatttaatgtagggagctgactggataacttagatcaataaaacctttctccttcatggtattttttctctatgcttgagatttttttttttaatcaatgcttcatcctccctgtgttggcacagcatggggagatttaacaacaacctgttggatgaaagttttatcatattttgtgctttcttaacagttgttctagccacttagaatgtgggcactataaagaggttgtatttttatatctggccactggacaggcaggatttagccaggcaggaaatccaaacaggcatagagaaatgtagtaggcagagtcagggccatgtcatatagcttctgagcaagaaagaggtctgggcatcactggtaagccaggaccacatggagatacacagattaatagaaatgggttgataattaagagagagatagccaataagaagccagagccatcgaccaaacagtttataattaatataagcctctatgtgtttatttgggactaaatggctgcaggaccaggcaggacagaaacttctgtctataatgctctctctctctgtggtaccttctgccacctcaaaactcagtaatattacattgaaaactatttgttatatttatttacttgatattgtataaacatccttggaggaaaattatgctttctagaataccttagtatttatggtattattacctaaaacaattactaggcaatacccaatgctttattaatttgaaaagtcatgttatcagccttctatttaagtcttcaattaaataatttggatgtatctataaagatataggtaattatatataattatatatgagtaaatattatgttactcattttaccaaattttatttaatgcattgaatttaaatatagaaataaaattacacaggaacacacacacacacacacacacacacacacacacacacacacaatactagtataccaattcaaagaatttcaccccttgaccacttatagtagtgtatgtgtatagcaccactctcagggggcagaagcaggaggattttgagttcaagttcaataacagaaaaatggtctcctctatcagttcctttcattttgtttggattgaatcttttttcagggttgttacacagacagaaccaactattttttcttctcctaccatctaggctgatccttattaaacatagatttgatcaagaggaggaaaaaggagattgattatattggtatttatagataattgtcataccacagaactcttgctgggaatgccatactcagtggtttatcttgcgctgtttaagaactttgtgtcctttttagagcccacatgaccccgtagtcatgtgtttgaatatttgttacggtgtttctgagagccaggactatgctttgattatctcccaacagttctatgcacacagtcagtactccataaatggtgtttagagaaataacagtaaaaccacttctattctttgtctatgatgtttccacaatttctttcaagaaaagtgagaaagaatcagtttgacatttcttacagaaagttctagaaaagagatgaggcagaggaaattaacaaaaactaaaatgtatacttgaaataagcttggttgacatcggcttctttctttcttacttgacattccaattatgtctatatcatgctggggtgcaggccatccaggtcaattactttctgtagaaagtaatatagaaaaatgatagggctttgacattcttcagtgtgagctgaatctctggagcagcaggagtaaacacttgtgatcacttcacagaatgacatgccccagggaataccaactgagttcctaatatgccagattttctgatgactttctcttgtctttggacctatgatatgtatttggagagaaacaagcattctttttgaaatctgcagtcataaattggaaaccatgcaatatagttttcccttttcatagctggttaatgttctcatgccttcaccctagctcatcaaaaaaaatctattttcaataaagaacaatggttaatatcaaggaaaacaaaaacaaacaaaagaacccatgagaattcttattaaattcgttttaagcatgaaagtctcagaatatttttagcacatacacatacacacatacacaccacacatacctcctcacacccctcactccccaccacacccacttatcttatccatccacacacctcataccacaaaacacacacttatttttcttcttcttctactcccaagagtaagactgctgctcatggccaggtggcggcggcacatgcctctaattccagcatttgggaggcagaggcagaggcaggcagatatctgtgaattcaaggctagcctggtttatagagggagttccaggatggctaaggctacgtagagaaaccctgtctcaaaaaaaaaaaaaaaaaagaaaggactgctcacatgttcttcacagtcaacccctaattaaaatgccaccagaatattagaatatgaatggtatacacctcactgctaatctcctaataatcacaaacaaattattaaaaatcttttaagacatgtttttgtttttggacactagttggttctgcctgttttacagagtatctaaaatgtggtagatccaagtgataagatttggacaaaaaccccacagtaactataagcattggtaataaaatgtgatggacaaggggcactgactcagaccacacatggactcagatgacattctcatgttgacactgttcattgtcaggtagttgttccatgtgtgacaaatgaaggggtgaggtcccaattctccaaagcctgagatagtgatccggcaaaggcatgtctgatttcagcatcaggaagctgctccctgaaaggtgttccaggcaccaggcaatgctgttcatctgcttagtcagacatcagaaagcaacgtctctgtatttaaccctaggtaattaaacctaacaatttgtggcagtattaatatttgtgtttatggggtttagtcatttgccattaagaagaaagctttgataatatttctagagcaatggaattaattatggaaagtgcttactgattcactctgaactatgacaggtaaacagaaagcccattatgacaataagggcaatatagactttggccatttcttccaggtaccacatatcacagaagagacagggaggaaaaagacaaaatgtagaatttaatttgatcctcagcaccacacactgaataagcatttaattgtgattgtctcctaagtatatccaaacccatttgtgctgtgatagacacagtctgtctgtttctatctcaagcaatctcattcaggggagataatcagttttgccaattataattcacttccaaagagattcttttccaattcatattctctttccaattcatgttctcggaaaggaactcaatgacaagctagaaaggtcacaatgtaaggagaaaaaaggtcatccaagtaagattttaaaatgtaaagctacatagttgaatgcacattctcacagtccttagagtgatataacttaacaacccataaatgaaatgaactttaagcatttaaataaatcccccaatataacaaatcagtaaaaatattaatgtagtctgaaacaaaagctttgtaattaggatgtgtatgttccctatgtctaattttctttggacagcaatgcatttacttatataggcttgtttatataaatgtgtatgtacatatgtatgtagtagaatgttcaattccattggattctgaaaaatcaaagaacaactccttcttggggaatgaaggctagctggaccaatgcattttcttccttccttcatctctaccttgcttccttccttctttccttctttccttccttccttccttccttccttccttccttccttccttccttccttccttccttccttccttcttccatccttcccttttgtacacgtaaagaaagtgcactgctacagaataatgttcttcagaaatgactttaaattgcatgcaaatgtgtggttaaacaatttcttttcaagctaaataggcatgactaactttgaaagttattcaagtgacacacagaaacattatgacttcatttcatcatgataaatttacattgctttcttaagaatgtaggctttcatcatagcactatgcatagcatctctctgtgtgtgactacatgtaatgacaaacatgtacacaagactgccttcaggtttctatttattttaaatattgtaagtatcttggaacaattttaaagctttatagaccccctgaaatagataatatttaatttttgcctctgtattaattatgtgggtgaattcaaattctttgataactgcccatggttcacatgtttatgtagatgctatacagattgggaattttacatttttagactattaaatagttagaactaagaattccaagtgaagttagaagtgctcggtccctttgagtcttaatttggggatgggtgtgtgatggtctaggtgagaatggggatgtgtgtgtgatggtctaggtgaggttgagaaaggaatcataaattgaacacaagatcataaacaagaatgcactattttgtatgctaagaaacatataatttaaaattttaaatataattattgaaataagatgagttattttcatgcacttaaaagtttaaaggagtcactgaggctcttcttaagtaggacagaaagatgcaccatgcagcatactccaatgcatttttctaataacccagatggatggctagtcagagctcatgggctgtgaagatttggacaaatcatttaacttcttgtccactatatgaaattacccactgccccttccaactctaaaatgcttaactctttcttctcaaatatttaaacagaaataatcaaagacatctttatgagagattttattatgttcaaaaacttaaaataatgataaataatagatagtagactctggctgtcactgagatagatccagatagccagagatgctggagaatgctctctctctctctctctctctctctctctctctctctctctccctctctctctctctctctcttgtaggaagggaaaggaaatctgcactccaaatccagccttgtatctgttttgtggatatatgacaaaaacagcaagaacagtggatcaacaaacaatcaaaagctaagggctaactattttcatatgaaaggaacatatttatgtatttaaagaaatgaggactataacaagaattttaattaaaacaaattaaggttatggaacattgttttgttagataatataaagatcactggggaaatgtcctctttttaggtcctcagtaataaaatggattagtatttcatcccaaagaatatactgatggtaatttaattaaatttatcagtgagtaagctataacttcaaagaggatgtttctagaactatcaaatctctaggaatcagatcactgtcgtgacgttcagtgctgggttagaagccaccagccttccattactctcatgatcttcaagagtgcttagaccttactatgccactggtggagagacctcctcccagggaggttggaactttggactttagagggtagaatttaagagctggtagtccaagcaaaatatataggggagaggagttctgggagcaattcacaaaggaccagagctgttagcaattatagaggttttaccttctaggacaatagagaaatacctgctcacacagtcttccaaatgtgtttacagcagcttggccatgatggtatttagactcatgcccaaaggtacccagcttctttcagaggccaccctgcacagttattcagattctgtttgcttcatttatcataactcagtgcctgcctctcctttcttgagggagaagagggaaggagaagtgaagataaaataacacatcctttaacttcctttcttcccctctttatgtggtctgaatggagtaatcatggatttcctactgaagatgcattttagatgatgtccgctgttcttcctctccaccatcccacagtcaatatttagataattgttcaaagctagttaggatgtaaggtcttgcctgaactgcagagaacatgttgtgatgcgctcttttccaagctttaaacacaagctttgtactcaggactctaccatgggccctggtaatttacctacccgccttcttctgaatatttatgcccaaatgccaggatgtcggatgcccgtccactcccatcacagaccacgactggtacaggaggagtgtcacgaaggtactccaaaacaatggagatcacgttgggtcctccttccactatgagtgccaccactggaaccccttggccgattcctgcattaaaaaaggaaaagaaaaggaaaaaaggagaaaagaacacaaagccagcaaaccaaataaacaaaaagagaaaaaaaaagcacaaactaaaattactgagcatgggggaggtaatgagatatgaaggaataaaatactgagtgacatttgtagaaaactcattagtagaatttctacccccagaaagtccacatgacctgcccaaaccccacaactagtatacatgaagaagggagtggctaacagagaaagactgggccattagttaaaatgttggaagccatattctgattgtaagaagcatcttatctagtagttcagttttctttgtaaaaaattggaagttaaaaatttccagttggttaccaaagaagtgtttttaaaaaactcttatcattaaaaagaagccagtaggtttttttttttttcatctactgctggctgcaatatgggtctgtgtgttcgaaccatagctgattggctaaacagcagctcccagcaacaccagcatcatagaagtcaccattttggtgagatggttttctgtataattgcatcctgcactattgagttaagtgccatgtgtgcatgatgacactctctacacatctgttgcattcagttgaattaaggggattcagagttgtttcctaacacatttaggcaattatttcaagtcacaagacactgtaattttcatctaaaaatttctgaaatatcagcattgtatgtgtgattcaatctaacatattaaagagaagcattgaaaaccaatgtccatgagagaaacaatgagctccagattcaatttttttaaagtgatgttttaagcatcattgaataacttatttttgttcaatttggtattgcactgggttaaactgaacaacattaaaatgagttgcttttatgatcggtccaaaagtgtttttacaacagacataattgaaattttgtgccacctctgtatatatgaatttatgtaaaacaaaacaaagataagttcaaagctttgatcatctgacttttctgtttgacctttggctgtcattttatcttgtgtcaggaaactgcttcccagtgacaagtaatagtttgggatttggtttttgctcgattggtaggagattttattggacttgtatgacttgttttccttctaaaatctgagtgcaccagtctcacagggtcttatcaacactaagttacagaagatggatttttttcatagtttgattttaatcttaaaggaagaatccaaaatactggttgcatattaataggtattgttttacatctccataaaaatctgtagagaaaagaatgactattggttaaggtgggggggggggctgtgagttctttgcatgctgtaatgataaatgggagagggatgaagcctgtgtgcaagcagtttttggtagatgggaagactttgaggattattcttgaaaatctaaggacaggacagctctaagaagaggacagtgaaacaccccgtggctctggtttccaggagccccctccaaccctgacaccacatttcttttcttttattttttttatagtttcaatatattcatttttttgctttttttcttttcccttttttaattattgattcaagttagggaacaggcttgtttcacttacatgtgacaccacatttcttacgaagtctgtttggatgtctgtgaaggaagagccttaccagtgctacttgctgtgactattaagcaagttcttaaaagatatttggaagagaaaagttgaactggagaccttatgtagcatacctcttttggggagaatttgatgtcataaaacactatgtgggggatttatacaataatgtatattgagaaacacagcctccgaggatagatctagactcattctggtctggcgatgcagcctagtgatataccacttgcctagcaaccacaaggctctgggttcaaccccaaatatgggaaggaaaataattagtggaaatctctaaattctcactcttgagcaaagcttctgtcagtgtgacttcaaatcaaagtaacttactacgtgaactttcctttaatatccactcagtgtcattatggagggagtggttctagactgggcatctagaatgttccagtgttttaaagcctagtggaaagcagtgaagaaaactggtaatcattttcccaaaaggatagacagttatgcaggatcagtttttatggactaatttgaatgtaatgagtttcaagtatttcctgaaaacatatttgtcaatatatcaatgttataattgctggaaatacagaaatatgttcaggatggtaatatttcccacatttggaataaaattggttattgaataattcagttaaattcagtgctaaaataatgggtggaacagaaatattgtctcccttttcataaacattttatatatctatatctgcaaattctcactcctttgatgacaaataacaaggtttgcctagtggttaaaatatttaatatttaaaataaaagcatcttgaatttcttatggcagagacccttgttatgcttagaaatactatgcttaacacaaatagaacttgccaagatctggcaacgtaaagctttttttttttttttttttttttttttttttctggacacaaacgtgcacattgattttgaatctgagggaggaaagtatattgaataaaaagtgatgtgctaaggtacgagtgttagtttgttggtaaagcaaattttatagaatacttgcatgaatgtggtgaacatgagaaactcttgctctacaaaaggaagtgcatgtctagacaaagatgtttctaggcaacttcgtgatgtccatggatccctgaagctcatcaatgaacatgtacaaaatggaccttatttaaccacattgaaacactcatgcattagtttattattttatgatcctcacagagataaatacccagatggcttttcaagctaatttctacatctgaggaaattatattccattttattgctcttttatattgattgattggacaaaccttccctggtaaaacactgtaggatatatcccttctttcattccatctgctctttctctcattctttaatttccctactcacactttattttctaaaccacattttgggcataacatatttaggaaattctctagaaaaattaacaaaatagaatctgtaaactattgccacacaggatgaactagatttttgcaagtcaaacatttttattagtgacacgaatgaaacactttgggaatttcttttatctgtagctggtctagatttgctcaaatcactgcctcctcctttatgcctataagaaattaatttaacttccttgcaaagctgtgtctttctcagctgaaactgttggttgtttgcctgcctattcctctcccaagagttactcagatttacactggaaaaaatgaaactattatttaggaaaacatttatatgtatattgctgagactatctggattattcctcttttggtttggggagaaagttggttaattccttagttaattgcaatcatttaaaattttcttctgtatctgaaggagacttctattagattctaagttgttttaagcaagaagatgtgacatacttgtcacatacctcaaccttagcattttctcctatccaacaagaatatgagctcaggaaatgggcaggagttcagcatggtccagctgacctggactctcgaactaaattcagagccccagttttctctgtgcaagataacacatttgacttctactgcatctttttctggctggtatgccattaagaaatggttccttatccccattcaggaagcttctaaattggggtaaataaagattgggttgagttgggtactgtgcaagaaggagatgggtggcaggaacagaaaacttaaaattccaagtcattaaaaattatttttgttattttgtgtgtatgggtaagttttgcctgcctggatgtctgtgtaccacatgtgtgcctggtgtctgcagaggccataagagagtaccagattctctggaaatggagttacagatgtttgtggactgtcatgtgggtactgggaaccaaacctgatctaggaagagtagccaagtgatcttaactgcttagccatccttctagcccttaaaaaaaatcttttctttctctcactctatcccctccccacccctctgacatgaatccatagtctataataagttcaggtacttataaaagcatttggtgtgctgtataaaaatgtctgggccactgagaggaatttgttcacactaacattctatgtcaagactatcagataggatttaaagtacttaggagtctatggagttatttattttctattgaaaggtgatttatatttacatggagatggtacatacaagattgattttgatctaagtctcaatgaccacaggccaagcttatggtattacagtctgtgtcatccagaaaggagtttcccgctccttgtatgagatgacttcctaaagacagtgcccaattaagaccaagtctctcattggtggggaaccaagcaaaacctgtggaaataccatgaacatgcttaattttcatctttgtcagctctgggagtatgttatttttagtgttttaaagtttggagaaagaatttagatgttttgaaatactgcttattgttggaacttaccaatgttttgagttgcacggatttaaatttgcataattataattacaattaaaaagcttcacccacccactaactcaactatcctgggctctaactcagcagttgattctgctgataaaaaaatggtcaccattacctgtatttagattatatgagtggtcagaaaaaccaaggaacccgtaaattgcatttttcaaacagaatctctcacacttttgagggacattaacaattactgtagtgatggaacctctacagtaccatagctttttttattttagattctcagtacctgtaagtagatatggcctatcttctatggtacaaagtgtgtaatggatgtaagaaaattaagcaaaattgtaatcagagccagtgagatggatcagtgggtacatttgacttcaggaatccacatggtggaaggagagaactaaatcccaaaagttgttctctgacctccacatatatattgtggtgcctgtgcatgcacaccacacacataccacacacacacaccacacacacacatacacaccacacacacatactccctcacacatacacacacacatacacatacacacacacacacacacacacacacacacacacacacacacacacacacacacacacacacacacacacacacacacacacacacacacacacacacacacacacatacatacacacacacatacatacacactgttgattggttgtgtctaactgacaaaaatctattttctttctctctaggcttaagattttttttgtaagtttctctgtcacaggtaggtaaatattcagatacaatcatggaaatgttatatacaaagatggtatataacagtaaaactttctccaagatgaaatagaaggaatctcaggtacttcaaagaagaatgagcccagaaaatatagaggaatgtcataagagaaactgcatcttgttttaaggagtgtcttgtaggtcctctatggatgtagaggctttagaactgccttggcttttggaagtagtatacagagttcattcaagatagtacatgacctcacttgaaaaggtgtaatctggccaggtatgtttagtgacttgtaattgaaatacccaaccaatgagtgaaaaacccaatatggattaatcccatccatgctctgttattacaacacatttttcttcaaataattttacactaaaattgatgtataagtgtttttggaaatataaaatgtcacacaaactagtgagcagtcaaaatattcatgggtttttagtaggaagaaacttcttctgagaagatcagggtctgtctttgagttgggactctccagaacccatgtgtccaacccactatgactgaataagggtaaaaatggcatgaattttttcaatgtccttttctgccattgctgaatccctgtgtttgattttaacttaaaggagtctctccagagacgatttctccatgtttaaagtcacggtaaatccatcagataaacatctcatatgttttgtcttgatatatgacatctcagatttggtcagagataagagcttgtcaagatacccaaaacagagggcttggattgatgggactgcctttccaaggcagtgataaaaaaaaaatggaaaactaacaaagcacagcatttctaatccttcagatagagaccataaaatctattaatatggcaaattacattttctatttgttttcttgctgcacagactattttgggcattatttatgcttcaaatattttcataggaatcctatcctagcccctattgggtgtctttcatttaggtatggccttcttattcaaaggatagaagggtggagatacttgaggagtaggtgaatgggaaaactggttagccagcttaagttctgtggaaggtccacaggaaaagttcatcaccttattgagggaaccactctgtacacagcactgcagaggaggccttgtctgacttcccttaagatcagttggacactagacctgcattaggccagatctatcatcctggaattgttgtgcctgaagcaaataactggcaggtagactgtgaaagcatgctttcacagagagagaagcctgatgaatagtggctctgatgcatgcagaggcaatacggaggggagagatcacgtggcccaagtgagacagaggaggggaaggtgggtatatgattaagtaggattcaagtagggaatagtttgcctacccttcctatagacacatttctttctcttcatcctatggcagtcttcatctatctttaaatgttctgaagagtcttggggtggtggcatttctaagcatagaatcctaagaggtagaatatacttgtacttgaaaattatttttgtaagaggaatttgcggtagaattgtggattttttttttggtttttttgagacagggtttctctgtgtagctttggggcctatcctggcactctctctgaagaccaggctggcctcgaattcacagagatccgcctgcctctgcctcccgagtgctggaattaaaggcatgtgccaccaatgcccggcaaattgtgggattttttttttttttgaggtggtggtgtaagaaaaaaatatagaggtcaatgatgagagcaatggtgttgctctcatctctgctgctatcaaatgtgggcttcgtgtgaggcataagtgatgatcaggtgggaagcccgtgtaatggtcatggtttgctcactgaaaaagaggagtcacttacatacaccctaagaagagaagggagaggggtattgaacccagtcctctgtagtagtcttagagcaccacctgtggtagtctaagcctaagggtaggatcccctccctcttctgatagccttagtggttccttagagagcaggacctatagctataccccatcataatatgctgttccctgcatagcaaaggctccccaggctcgggtcttgctttgacttcagtggcatgtctgggagggcattgcttcacacatgttccatttttgtttcatactctggatgtctcaagtgactcactctgggaagactctgtttcttaggctctggggggccctgtctagagctgggcagaatctattacctccttgttctcagttccatgatggacagtcttaccctgtatccatgttgagcttcccatacacttccatttcctttcactggatctcagcaagcatgcctgtttctagtgtcttcttgccctgactgccattaccagacaccctgtcagaatggctagacttcatatagcacatttgctcaatctcatggtcctagaaggtgaaaaaggccatttgatggaatattatggaatttgatggaaaaaatatattttgctattttgtacaatatgtagcacacagagtaggtccctgatttgtgagatcatcagactgataaaggagttattatttaaaaagtacttggagcagaacttggcactcacgcagagccttctggttagataaacataaatataaagacacttacattaagcttataaaaggtttcttcttttaatatagaaatgaattatgaagatagaagaaatgaatgcaatttatatatttaagccaaatacatgttctgattgtgaaataccagaagcacatctctctaaaaatgtgcctagtttctaatgcagaccaacaatatgttaaagccatatgcatttatgttgtgtccaaaacccaagacctcctggtttgaggtagatgacctttaaaattaaattaaaattttcctagttctcagattattcttcttagtgttccagtcagtttatgaagtcttttgaatgggttaaaaaatagatgtaaatactaaataataaaaacaataaaccaaatgcaagtattttatatgctttcaaattcacttagcttttgacttaatgggaaaagttattcccttatggccagatggccctgattgaaatattctgctattaatgtcagtatactcctatgccacgcaagtggcatggctgtgaataatttcaatagaaagggacatctagtcccatgggctataaagtggatattactttcaagaaagaaaaagccagcattattttctttgggtcattgtttgaagactgaatgttttaatgtaattgatctgagctgacaagaaaactcatccaaacaaagctatagtcttcatctctgtgctgttcaaaacccacatcaaaaggctgaccttgccttctcagatgtggggtaactggagaagttctgactcattttactttaaaatatttttgccaacacttttctacaaatatcccaggatccaaaaacacagtccacgcaagcgcctgcactttgtggaaaaatgaataaagaacagaacagttaaggcgactgtgtgttgtgaacccagggaaggatctggcctgtgatgcagggaagagctgatggagagggggaccatgttattgccaatgtgtgttaactggccatcctcaaattacatgtatgtttttgctttgcatctgttaagggagaatgcaattacttccaagagtttttccttcaaggaaagcttccctctacccacccctttctttgagaactttatctttctgttttcaggttcaaagacaggtcttccttaaacctcttcttctttaccactaggcagaattagacattttgctgtattcttttataacttaaaaaagaagtcttcttgatgactatgccctatacatttgacaatcagctacagcaatctaaagtggaaggctctcatggccccctgcgtctcttgaaatttttttccttggttatatattccagcatctcattcccctacctggcagatttatcttagtaattcaagcatatcacatagtgttcttcatgtagtagctgaccgctaatatttggaacacagagaaacaggaaggcagagtgctttttcccctcgtctgccctcacttatgtcctcacgattgtcatgtcagtgtatttccttccctagaaaattttaaatattttacaacatgagtaatttattctcgggtaactgatacatgatttcccatgcctccaaatccgaaaggcaaatgcccatatctatgttcacaggtttttctgtgtgatattgaagcccactttggtaagctccaggccttcctatgagttatgtaacagctaaccattatgcctaactacgctctttctttgaaaatctggtgggctttcacggcttattaggaaaatgctgaaatccttccgcgtgatacataaggcccctcttctgccagactcagctcacagctgcatcttcgtctttctcagggtttttcaaactgtgttctcacacagcatcctcagggtcctccatgtacgattctttttaagcttctcttttagtcaccctagacttcagagaggaatatctcttcccacaactgtcttcaggaagaggtattttaacaaagcagttccatggacttttatctacccctggtaaatttaaagagaatatttgagtttggtcagccaagcccaataccttttcctccctctcctgcatggagcaggggtaggatgcggtggggtgggatctcccaggtcctccagaggctctgcctagaaggtgggtatgaggtgaaggggtgcagcatggtgtagagttctgctcaactgtgggactcatccagcctatttcgacaatggccctaaagccatgttcttctgcttttccctataagcaacacaagtggtattttgggttctataacctaattacttttgtttttttaaatactatttgaaacttggataaagaagatgggcactgtttattttgctccctgtgtccccctcctcagacttgaattcaattgtgaaagtctggctcaaatgttatcagttcttaagcctaacctgcccccctctcaggcagtattaatttatggtgtctttgtggtcccattgttcattttaaaaatgtctttgggcaattactctgctttgtcttaatagaagtttccccgccccctctacattgtaagctccttgacagtgatttccccactcaacatattggctcccaaatgcatcatgctcagaaggtagtttgaacaaatgcttgcaacataataaaacaaaaacaaaatgcacaacaccttgagacagtgcagatgaagggacaggaacaattaagggttgcaaagagactatcacacctcaacactactgaggcatcctcctgaaagcacaggtagcagctatttaagtagctctgtggcatccaattctcagatctttactatagggcttcagcagtggtcagagacccctgggtcggtctctgactgtagctgtccatcagatgtcacatgtttagaaatggaatactgtctgtactttgaagtggaggctgtgctgtttcccaggactggacccagctacagggacaaagcatctcagccactggggagaaagatgtaatcaaaggtttacattcttccccttgctagaaagatgcttgtgacactataatctcctttggttgaaatgaatagaggcacatgtgactgaaactgaagccaaaatttcttcccactgagttgatggataggttttagcagcgggctaggatgaccttcaccaacaaggtgtcaaaacaacaaaaatagcagactgtcattgttagacacaagacaaagacattggtggttatcttggatccattattacttggatcatttgggatccccaattgtgggtctaattttggacccaaagcacaaaactagataattattttatctgattatctgtttatctataagttatatccagtctgctcattctttgatgaaccgtcatgagaaactatgagactttacaggaaactgttttctggtttcatgcttctatgtccatggattccattcccatcactgtagcatccccatccctgatcatcctgtttgtttgctcgcttaggataaattcttactgggttataacacgaataataaaaacccaagacagatattggggttcatgctgaagatcagtgaagcaaagcagctaagctaccccagagagctcttacttctatcagggctgggataaccctatcctcaacatggctggagactaattcctaagactaaatgcctgctttgagaccctactcctgtcttatatacctctctagtgctgggattaaaggcatgagctctgtttcttttttagactgatttactctcaggtagccctgagtagccttaaaatcacagagatctatctgcctctgtctcccaagtccttagattaaaggtgtgtgccaccattgcttagcctgttatagctgtggctagctttgtattctgatctccaggcaagctttattagatcataaacaatatatcaccatactaggtagttgagagtggcctcgaattcatgattctcttgcctcaggctcttgggcactggaattactggggtgcaccatcatgcctggctctatggtttacttcttgactggtgagggctagtttgtgagagtcctttgaggagagttttcagccttttccctcttttccctcaggggatgaatgctagtcacctacctaggtaaaggtgagtgttggagaacctgtttcttgactggtgggatgtgtgggaactgacaccccacactcctcactaactccaatagtatcatcatcaacaaaaatgacatttttcctctccatctgcctggctgtggtgtctgactgccaatatggtccttgtcaagagctggctgtagtatggtggacctgcagctctaacactgtgagctacaaatgctaccattccagctccagagtccacttagccacagcattgagacaacttgagtttctggttccactttggaatgtaaatctacttttaagtgaaaaaaaaatacaattttccttgcatgatacttgttttcttcatagtatcatagctctctaacaagcaagttgtggtaatatattttttaaagaagttaattacaaatgagtcaaaacaaggctgcttgtaaactttggggttgaggtgaagtgttgttgtgcactaatgaaatcattcgatttatcattaaattagagcacatttacaagtatgtgtatgtgtccttattgataattacttcagtgttccagctataagcccgaactgcttaattctggacacatcttcatgtacagttgctctaccacatgtacaatctcaaggtcatttctggcagttcttaaaagtaaacagcaatctgtggtgcttaaaaggggccctgggtttgtttgaggtttagggccccgtttcatgggttcagttttctgcccctttctacacacagctgttcattgtcagagctattgccttatctgcatacggagacatgccgctccagagaaggactggaccatgaagcaaaggaacaatgcagaggtacccgtgcccatccctttgcaggaagatatcagttcaaaacttttcccatgggctagcaaaaccttaatggtgcaggagataaatccctgctgcctctcttctggagatgaacaccacatcatatcctcattaaaactcttctagtaggaggatgagaaacagggagatagttatggcccagaggtatgcagtaggttctcagagctctctcaatcatgggagtatttaatcctcttattctgtgtgtctgtgggaaatggccttttgtagctgttggcaccaaaaacctgtgtgaccgcaataataactcttgaccttattatctaaaagagggctgtcttaagattattaagtaaggacatggtcctttaagggctgctttaaaacctgcaatcctcatgtacagaagccgtttgtccagttgaaaatgatcagaagaaagggtgtgtggaaatgtcatgccagcgtctgtgctatgatggaggctcttcttttagacccatcaggatcacctgtgggcccactgctccaaagcacagcatggcccctccctgggagtttccagtcagcgagaatttgtgtttcagggcagtttccaggtgatgctgcagctgttgttctggggaccacactttgagaatcggtgacttagcctaagatgcagggggaggtaacaaaacaaacaactgacatctaaaatgtgccccactgaagcaaataaaggaaaagtttatggggtgacactgaaggcctccacaatgttcctaggagtctactttaaagcataagccttcaacaaacttctttcttacagggtcagataagagagtatttttcagctttgcagcccagatggactcctctaaaggactccactttgcaattgtaacacagaaccatccagaaatactttatttagaacagcatgtctgttgtagtaaatctctatttacaaaaatagatggtatgctggatttggctcctggctatatagtctgcctgcccttgggcctagataatgtgctaaaaaaattcatagaaggaaaaatcagttagttcatttgtcctgagtgtgcaatgggaaatgattaagttggacatgtatgtgtaagcccagcattgacacaccttccgttgtatcagtggcatattgctttcattggcagatgaactctctagcaattcagcccctacctggctacttgggactgtacagagtccttccctgctccatcccaataggagtttcactgtgctagtgaaatttctcatgtttacctgcattttctttctggtggttggtttataagtaaagaattatttaggggaatttacgagttctgaattagatttcattttccatttgtttttccctctcctcatttcacaaagagccattcgggtgcatttctacctatttcatggcaggtttgtgttgtttgctaaaagctgctaaaagcaaaatgactcgaagataagctttctggatggcttttgtgaaaaaccaaacacatgccctgaagggcataagagaaaggcgagtgtctttgatggggacaggtgtgaccaggtggaatgtaaggaagcatatattactggaaccagggtaagagagtcaactccccgacccagtagctggttcgggtctcaggacttcttacttggctatgacacatgagcctagtggccatcctgctgatggacatgtgttctttgcttggcttcagacagtcctccaccctggattgttctcacctcaacccccacccaagccccatctcttgtgctaattcttttatctatctgatatttgatattagggttgtcctaagacatgcttttgatgctcttctctctctctctctctctctctctctctctctctctctctctctctctctctctctccctctcacctctctcctctacagcctcttcatgtgtttcccaccccctccatttaaaattatgggattctccacaggtcttacttggcacaggagtgccagagttgcccactctggagagattgaaaagatttggacaacttctggatcatgggtaaccttgaatgaggggaattgagagcctcccctcacccccaattttctaagttgtctgtaagcaggagagagtgaaagtcagggaggatgtgggagtcttcaagctgtgattcccccaagtgcatgtattaaaggctcagtcccagaaatgttgctaactgggacatgttttcaaaattaagtcaatttgaagttgatttcctcagttttttttccttctgaaatggtgtcttgctctatagttcaatctgtcgtcttggccttccaagaaagacctgaaagtacaggggtgcaccactgtgtctagctccttacagtgataaaaaactaaatattagcacagggctgaggtggtagagactaatgttgatggcaagtttgaacttaaaaaatatttggagggggatgttggaattatttgaattaaggaaaatgttattatgtggcatttcctgtgagtctgagtttatgaacactaattcatactgctacagttcttaggaattgactaacgagaacatatagatcaacagggcaaaacaaatgcggttgtgtttcaacaggccaggctctgaggctggaaaagaagagtgcagggaactgctgcctacattttcaatgcaggcatgccctgctcatttgccgcttgcttcacagcctctcccaggattttataacaaaccctaatgtgcagcacagacggtgcacacttcctgtgttctccctctgggtggaagaaattctgctaatgaggcagggctcagctcggatttgtttgatgaccaggaaagctgactcttcactcctcaccctccctgttttggcacaggcccacctattctttttctccactctgcttctttgtagcaggaactgcccacggatccccatgtggacccagagacgccaaggcttgttagggttgtgcattcccctgtctgtgctttagtaggacttgagtgtgtgcctgctgggctgtggcatgtagacctttgctgagtttggaaatctggcctccagtgtggaacagggacagcctgttcagtgaggggaagagtgctgttttatttcagccatgggtgccaaaagagaggcaggggtggagcaaaatctgctgcttgcctccttagctattattattaaggcatgaaatctcttattttcctcacttttttttaggggttaatgagctgagagtttaaggtcaaatttttttttttattgttaaaacaatgatggcttcagtagtgactcccaggacccttattttattcttcagaactgtatgaattacattttgcttttcatatccattcatttcaagagcttgaaatgttccaaacaacattttgcagggattaaacaaattattaacaatcctcaaaggggactttggagggcttgtgctgagttcttcaactctatccatcttcagcaaatgagagtttcaatccacgttcctttgagacccctgtggaatgagataccatctcttctctaaatatacccatgagttgatgattgtggcagaaaagcacccagtcagcacaagttttcccatctattttctatttgcctaactttctaaagtttgctttgcattgctagcaaatgagttgatcctaatctaaactgaaaagaagacataggtgactattactttggatcagtgggaagaaatcaatagatatttctttttctgtataaatagaaatactgaagccataatggcatcagctaatgcaaaaagtcttctaaatgcattagttggaaatggtttaacaataatttccatggaataaaaacacagtcaactgtcccagactgaatgttcttctctaccagtcatggtgctggtggtgatctttgcttatataacttcctgttcagttctcttcattgggtctctccatcatgttaacctcacttgtcttttcctttctggactacattgtttaagccctctaatagctctacgtgtcatgcttgaaaccaaagctgaaagcaaggctaggaagactcaggattgccctttacaacagcgatctcctgggcatgtgccagggactgcactcagttctcaggatgctaaaaatgttcaagatacaggctctgctttgtacagtctcagagattgcaggtgacaggaagcccagcagggcaatgggcacataatcactaatgagtaagaagtgctaccacagagttctagagagcaaagtggccatgtggaagatgtgaggagtgtgggcctatgaggtacatcaaggaagggaagtacttggatggaaggtagattcttaggctgagagattaaaagaatgttgccattagtactaggagaggattgaatcccagcaggtatcaaaaagagacaaaacatactcaatgggctatattattccaaggaaactgtaagcatcttggaatgagtggattagaatgtccatgtggcattaaggtaaaagaagctaggacagaagcaggaacaatatggagggtccttcacttaacaatgaaacaagaaaaggatcaggtcccaccaggaatgtcctgttatcatgaaaagaatataactggctggcagaagtaaatttgattgattccgagagcaaaagtatcaattatttccaacctaaatctttctaatatgcaaagatttctcaccattcttcactccatggagaagtgcccagggcatcccatttgaatgctgggcagattacctggtcaaactgtgtaaaagaactgtcccatctcggaacaagtaattctgaagtgaaaaagtttcttttctccaaaagagaaggatcctagtttgattggaaaagggtcagatggacaagacaggcaaacactaaggaatcatttttccttaaaatttcttctattctccaaagttgttttgacttcattgttttgattttcaaagtgaccattaattaataaggatggctaatattttacataaccagcttgtgccaagtcatttcaccaaatgaagagaagtcagggctgagatcgttgtattagaaccacccaaccagttatcctttagatagaaggccctctaaaaggcagaggaaaatctgaataacccaggctgttgagatcatttgaaaaatggcatagtcatcacagtccccagtaattgcttatgactttggtactcataactatagcaagtcttgaacttctgttgagacagaaaaaagtctgtatgattggtctgaacagaccaaagcatctacagaaggcaataggatgttcttgatatacatgtgactgctcggaggaagctcagtttcctttaccaattagagtttgaacttgggattggttgataatatgtgagagtctaactcactctttctcacttcatgacttccctgggtaaggttctatgacatgtagagttgttacccctgttttgggaaagttatgggctcagtgatgggaaatttcatgttatggttatcctaatgcatttgatgatagtgcaatgatcaaaaaaagatgccagtgatgacaattgaacgtccctttgccttcccagcctccttcatatattctcaggcataggatgacaaagggaagtccacgagtcacatgaagaaggactgtagtagccatggtacacggtcaggagctcctccgcttgcctccgtctgccccctcttagccaccctctccatttctgctcatgttgtttctccagcatcttagcctctaaccagcattctttccccacctgaatcctgattgatggctcatttaaagcaatgattaatcaagtctggaacagaatgagtgctcaactaggtgccgaattaaacaatgcttcaagctttcaaaggtagtcaaattttagggaacttcttaactgagttaacgccttgcatgtggatggaaagggtatgagggtttgggaatcttaaaccaggtgcccaagtagttggatataaggttaaaggtataacctgtctgagatatccctttataactataaaaagtcatgtaatttctaccttgaatggatttttcaagtattaaaagagacagtatatatggtttgtatacatgatggcttctatagcatctagaacttgagtaaactttccttttagtcatatcttagaatactgctaagttgtcctaggtggcagattcagggtgacaagtcaaaaggaatcattaagctgtgtggggatggatgtcttagaagggatgagtagtagtcaggagagtgatgtggttaggagtatttaaaggagatgatagcttctatggttaattttcttggttggggtttaagaggaaattcaaggttcttgttaatcatacttaccaattgggtctaattggcaactaccccaaaatgaataaaacaagcgggagtcaagagagaaaaacggcaggcatcctgtcaaaaaacaaaagctttgaaatttctataacccaatggtcggatacacattctattaaagcagatggaccacccaatttgtgtaagtctgtgtgtgaaacccacgcttcacctacagagctgtgcaaagtatcacatagacttctcacaaccaaacacaagcagattcataaattcaacatgctttccgctggaggaagcatattttgtcatttcctagtctaagatggttataggaggtgattaagacacattcataggacgtgtttgttccagtgctcagggtaaaatgataattatgactctttcagttctgtgtcttctggtgcctgtcttatttcttccttttagaaacatttctgtgatttttcttttttagagaaaaccttccattgtcaaacaattagctacatatgaatttcatttgctggtcacaggctaatcgacttgatttgctactaaatctgaacaatgttatttactgaggcttctcattctgctctttctcattggctagccaggggagtgtctgtgtccccaatgccccctctctgtgtctttaagaggtatcacagtcatttcagtatgtcaaatttcataccaagctggcatttctgcctcccaccttggagagacattcgttggtaagatcctgtttggggagttgctcactggttaagttagccagtgtttgactaggtagctcaaacggcatctgctatcaaacgtgggcctaaagcagccagtctgcatgctctaactctagaacagcagagagaggaattccaggacttcttaggactgagctagacttccagagaagccccagtttgtggaagttgctgggatcatgggctgggcagggctggctggctggtgagaggcactgtgtctgtgtgcatgggtcatcactgagctgttcctcaggtccaccacctgacacatctgtgttgttagaacagtgagcacattgagaaaagcacaaagaagtatcctttcaagcccaggacgggggttgcttccttcagtgctcatgaaataacaataacaatgcagaagtgacagtgtcacatttcccagagcgtccataattagtgtgcttctgaggacacaaattcagcttacaattgtgtgtagcgatcagaccacttgttaatactataaggaaagcttccactagatagcaaccatacccccatatttaatgtaagcattatgtatggaactgagcaataactaaaatatattataattaaataaatctggctttgctgcatctttcctgcagagtgaaccacgcgctggcattttcagtttattctttccctaggtatataaactcctcatgaagaaaaatctcaaaggattttgtgctaaagggcatgacaaagagaggtagtatagttaaaaactggaatgtcaaggcaaagggatgcactgattgtgtccctggttgtcttgctatttccttaatgactccaggacacagcagagagatgatgagtgagaaggcgggggataaaggactaaagattttgtaccaaaacaagattgattccacaagtgctgtattggcatatgttgctgagctgcttagagaggtttatttatttcctcggaattcttaaggcactgtcccaaacagagaaccatccagcaaactaagatagtgacatgctgctgagcagggaacgacagactgtgtgtagtttgtgttcaggtagaagctccgtcaagtcaatttactgtgcattcaggtaggacctttggctttccccaagtggcttttctatatagagaataaaagcagttagctagatgagatctacagattgtttatatgtctgtgtctgtacacacacacacacacacacacacacacacacacacgcatgcatatacgcacactgtactatttatgttctgattctatattctactttagtttctccttaagactctgttagtaaaaggagtgaaacatacacacctatccttatgagtttcatgatttatatgttctaaaaaactaacttgagttcacatgttctcattcacatttgccccagaaaatttccctgtgccattagaggataaaacttaagagaaatgaaacaagtttcaactctgtgtactgcactaaatttctgcctattgaaagtttttacctgtgtggaatgtaagtgtactgcccccattgtgcctgtcaaatcttgcttgacagagttccccatgaatattctatccagaaatgtttttgtctgaattgccactgtactttgtatcacaaagggcatgaagcacttgctgttctatagtgcagcctctgcacacatagccagctctttagagcaggttggtataggcgtgatctcagacacagacttcctgggtctgccacttagtagtggcctgacctgtggtccattccttggcctctgtgcttcagtttgcttactaaggaacagatgaagaatgactattgtagcgattaagtcagctattccttgtaaatgatttagagcagcacttgataaacacaaggtcttgttgacgtctttggatgactaggttcttcaagcacaaagctatgccttatgtgtcttgtaacctctacagtgctttatgtagtgtaggcactagggcaaatttgaaaaaaaaaagccccagagtagcattgtcataagaaaatggaatggtgcaatcaccatttgttttaaatgacaggaggttttgtcacatttttaaaaagtaaggaaatttgatatatactttcctgcataggaaacatcttaacattatagtgaggtgaagagtatgttggagacacttgctacagtgagcatatgaacaatattcagcatgaaactgctgtggaatgggctgcaacttaatgaggagaaagggaactgggatacccaggagtgtaatgaaatagaaatgactagttgttggactgccatatcctcctcttggtagggacacagatggagggtatttccagtctccccattacaacaggacatctatttattgtttagtactggaaatgtgtttaagctgtgttgtgatctgccaacaccaaagtgggaacatgacttgtgttcagattttagttgttattaaatacaagcatggaatttgttacactggcctcataatttttctataaccttcatatgtgactcgagaatattgctcatgtgtctgtagccggcctctcttcccttgttctttgactggatcctttgctggttttactgctaagactgcatggatcagggaagaggtgttttgaattcggtgatacaggctcacatttactggtcaggcataatgggggtcaccctagagctggggtaggagaacaaggagatgagagctaaaggatacaacaggtgacagaacaatttagaaataacacacaacatgagaactggtgtgttaggatttttgccaaatgagtagttatggctgtgcatcacagggagatggggaactgtgtgaaatagttttactaagatatgtcttataattctacattgtagaccttagttatacataatacctattttaagacatggtatgtatatgtgcagggaaagtaagttatcaaatcctgtgttacagggatagggagactacttccaaaggcttattcatatcccctttggcaaaaattgtctctgtttgatgtaaaattcaacaccaagatggctagttttatgccagcttgacacaagctagagtcatctgaaaggagggaacctcaactgagaaaatgcttccctgagacccagctggagggcattttcttaatgattgatgggggaaggcacagccccttgtggttgttaccatccctgggctggtgaacctgggttctataagaaagcaggttgagcaaaccacgaggagcaactcagaaagcagcatccctctgtggcctctgcatcagctcttgcctccaggttcctgctctgtttgagttcctatcctgacttccttcagtgataagggaatgtaagccaaataaacacttttctctccaagtcactttggttgtggttcttcatcatagtactaaaaactctaacttagacaaacaccaagaagtcttaaaggcaaaaagtgtaggtatctcttcctgccttttgtctcccacctggttcactataagtactatttaccaaggctccttagtatcctagaatactagagctgttgtgtaagcatatgagtaaaaaatgtcgaaatgtggttatagtaagcaaataattacattagaatagacttttgactagataactttagatattgtaaaagatacccatagatagctttctatatgatcccacacagaactattttattatctatagtaatttgagtacttcactacatgtctctataagtttttgaactattgagtgatagtttatttctattttgctactgtgagcaaaattatagtaaatatatagaataaattcctaaatagtgaaattgtagactcaaagggtttgtacacctaaaagggatgacagagtatccgcttaataggttcccatatttacacacataacaaagatgttatcagttcatatttatatggcatttattgacattggattatcttggcctttgatgttgccaatttgattgataaaactttttcattgttgaatgatgattaatctttattttcttccccatagccttcatatagatatgtttttctcaatttccaatagggtgctacacatttttcttttttattttattttattttattttttctgagacagggtttctctgtggctttggaggctgtcctggaactagctcttgtagaccaggctcaaactcacagagatccacctgcctctgcctccccagtgctgggattaaaggtgtgcgccaccaacgcccggctctttttgattttaaataatttgcctattatggaagttggctctttgtcattcatagttgtgaatatagtcttcatctggccatttttgaaattatttgtgttttttttctaatgggatttctaaccatttggtttctatagaaacctgtcttgtgtgcacatgaaggtcacaatacttacaattttaggtgttgatcaaacatccctaatctgaaattttggtagctccaattttctgaaatctgtaacacaggctctcgagcattttagataaggaatattaatgtatttcataaaattatagtgggaaaggatatacagccagaaatgggacaaagaaattattgtgaacaatgcagtataagagagaaaagagagagtttattttcaaagttcttgctgtggcttcattaaatgtgtaaggtgatacacacacctgagtttgtttactcactaaattgaaactgcatctacacctagatctaacacttaagttggactgaaaatgcaagttaaaaatcaaaggaacaattaaggttgaaaggataattacatgtatatgatctctaaaacaaggaacccagtgtactagttatgaagattaattatagtcatggattttttttttataactgccattagcagacatgcccattcatgtgttcagtagttctctgatggcttcatcagcaccccatcccccaacggctttatcctttatcctgtataatgactagctatcacttcaggattattcaagtgtaagacagccagactggataattgacataaggtgctagcacacctcctcatcttctcttcagtcccctcaaagatttcctccactgagtcagagaatgagctttcagcttccctaagaaaattctcgtttccttctcacagagagccaaggcatttctgttctactgcctgttgccaggactatagccatgtgtagggcacatgagaattgctttctgggattcatctttgagatcttcccatcaggaatatgatgtcacagaagcacaacatctgtcctcctatttttattattttgttatttaaaatgttgcctaatgtgtaacaacacatttatgcattgcacagtatagacaattcttttgaaactaagagaatcttctgttggataagtttatgaggttaatgaaatcagggttgacgtgtagtccagttgtcacaagatggcttagtttaaatatgatatccaccacatgatactaaaaagctcaaaggtgaggtgggaaagcacaagcctgtcttatttgctataggcactattcagggtaatttccccagtgagcatcctgcttaagacaggcatggtatttatgagtggcagacatgctctatccataggctaatccaagctaatatccagtagatacttggaatgttcctttttaaaggtgcagtaaatcaatcttctagctgtctttcaactgttttcctgcctttcctagtgataacattttggcttgctgcctatctcccagattaagactgtatttctataatcagtgcctgacacaagatgaaaataaaatataaaccaaaatgatattcttgttgagcctctaaggtgtgtgtgtgggggggtgggaggggtggaggaggggtttgtttacaaccctgagttgttccttgtttctgattcattctggccagaatgtacccgacttgatgggaaccacataaatggtgatgtagagcaaaccaaagaaggattttgagtcctggcaccatgatgctatcattacatatatatttgtgttcagaatgacatgtaagtgggagtagtctgctctgatcccatgtatgcctctttgctttcagtcactgtcacaggaacagggcctgattcctaaccaggatcaatggttttgagttttaacaatatatatatcaggaaaaagtgacctgtgaggtttatgctgtaggccatctttatttcaatcacagtgttgattgttaagacacacacacacacacagtaaaagtaactaagaatttagaattagcacacattctggctagtcacctgggaagagggagcatcagctgaggaattgcctcaactatactggctaatgggtacatctacgagcattttcttaattgctagttgattctggagggcaccacccatcccatcactaggcagtgggtctaggctgaataaaaaaagcagttgagcaaatcagagcgcacaagccagtaaatagcattctgcagaggtttctgccttgagttcctaccttgtctttcctcaatggtagactgtaaactgagatgaaacaaagccttttctcccaagatggttttggtcagtgttttatcacagcaacagaaagcaaagaacacataaggcattaggtaacgtgatggtatttcgggaacgaagtgtgtttgaggagatctttctctccttcatgttacccccccctctctctctctctgacttgtcccccttccttagctttcttttggtctcttcttcaattatacattgcgtgtatatattacaaacttggataaaaatgtgagaagaacatgtggtatctttcccagctttcatcaccttacttgatataatactttttagagccatctattttttgcagatttcattttctttccacattaataaaatttcactgtgcatatataccaaatagtaattgtctattcctctgttgatggacatctaggctgcttctgatcttgcattcaggaatagggcatcaataaacatgactgtacaagtacttatcacagaggtatcacagaggtacttgtaccctgggatctatgcccaggagtagaataaactagatgaattcactactgaattttattcaaattttttcttttttcgtttttgttcaagacggggtttctttgtgtagctttggtgtctatcctggcactctctcttgtagacaatgctggccttgaactaatcgagatccacctgcctatgcctcctgagtgctgggattaaaggtgtgtaccaccaatgcccagctcattcaactttcaaggaagatataataccaatacttctcaactgttccacagaagagatgggaaagaacactaccaaatcccttctatgaagctactattattttgatattcaaaaccagacaaagcaaaaaagaaagaaaattacacaccaatcttcctgttgaaatagatgcataaattcccaacaaaaatcaagagccctgttaaggaaatcatatatcataattatgtgggcttgatagatatagatttggcttaccatatgcaaatcaataagtaaaatggaccatataagtaaacctaaggacagaaaccacagaatcatcttgtgagactttagtaaagccttcatgataaaagtcctggagataatcaggaaaaaaataacacaacttaaaaataaaggctatgtaacaaacatatagccaacattataccaagtgggaaaaaagtgctaagaaaatttcttctaaaattggtaatgaaacaaggatttctccttaaacctctcttattcaatatagcactttgagcatcagctagagaaataagacaagagaaagacattaaaacaataacactagggaagaaagaagtcaaactattcctagttttagacaacacagttttgtacttaaaagatccttcatacaataccagaaaactcttagatctaatacacatattgaagaatactaaatcaatacaaaaaaatcagtagctctcctatataccaacagtgaactcggagttctatctcattcataatagtaaaaaaaaattgcctgggaataaatctaaccaagacagtgaaagacctctgcagtgaagacttcaagacattggaaaacagaatctaaagaaaatgcagacgatggtaaaaccttccatgtgtctataatggctagattaacacataaaaataatgctattttgcaaatctagagattccatgcagttttcattaaattccactgtaattcttcagaaagttaggataacatttcagagattcgtagttttcacatttctaacaataatatagctgggcaggttactaaatgttcttcatatccctgtggtggctactccttagcactgctgccaatcagtgccagtgatgttgatgaatccaacaggttctttgattgatgccagccttgtgggagaattggctccatagcttaataatagaaaatatgaatatgtatacatatgatctactatagtctagggatatgaaatatatatgctacttgctagatatacaatgtaaattttttttttagaaaaattgccttacggtgcttgcttcatgaattactcatttgttcaagatttactttgcttccctgcctctaacttctagaataattctaagtaatttacagataaaaaattagcatttttgtgtgtttgcatctgatatctattctggtagaaccctgatttattagaatgttccctgggcaatgtcatctaaagaatgagcttgccagggtgtcagaggtaaagcaacagcctgtctgggttttgtctcatccctatattatgtgacaattgtagactgtgggatttctctggacaccaaaggctatgacaggagagctcccagcctgcagcactaggattactaggcctgcaacatccaaagcaggtgctgctgaattggaagttctgacttgatttacatcatggctggttctgcctgttaggcaagtcagtgtgtccctttaaataaaaacagcttttatatagccaggatggcacagcagtcacctcagctccattccctggctccaaacaccaatggttccaatacagggatatcattgggcatctctaagagagaatagacttcattctcagcacaaatgaagttcaatattacagagaatttctcatacacaggtgctattaggatgtatcagagctggcatcttgcattatggatttaagggtgccaaagtcattaaagattgttaaatatttttaatctcaccactattcctaaatgagttttcttcttcatgtgttcaaatagaaagaacatcctaagggatgccattattgggaaccaggagttcatgttgtagaatgttaatattcttgcccctctcccgtgtcattaattaagtaccagagattgggacaactccaaattctctctctctctcattttaagtgtctattaaaggaggctataccaccatagctgaaaattatgcaaaagctatctttcatagtggttgctgagtacagtaataaagggatcagaatataaatgatacagtcatgagtgtttacttctaattatagaaatctcactgtcataaattgctttaaattggtgtgtacctcataggcacataccaaacttcaaatccaatttaattttaattttaaccaactggacttacctaatctcttttacccaactagcttttacaaagctttaatttaccccatgaaccagtgtgttcataagacctgtctcagtggaaaggggaaatgctcccccaaaaaatctgggatgtattacagataccattctatcctattgggacacacccctctcattactgttatttttgcagtttgtgtgaataagtacaaagtcatatatgaataggtttattgcaataagaactttataaacaaatttcccccagaggcttctaaattccaatatcatttgattgtattttaggaattctacgatcatttctgttccttgtttacttaaaaacataaatgtcaaactcattttaatctgctcctttagagaaaagtgctctgggtggcctcatcaggcaaggccacagttaaatgtcagatgttattctggggcgaacggcatcaaattatctttctagcaaactggcagtgtggaaacctcagtgcactcagtgacacctccattaactaaacctcaaagcacacgtgtctgctgtgggctgccaggagaggattttttagattgtatttagcctgatggagagttctcatttaagcagagaggaagagccagggaattctagtttcataaagatggcctagactgatgtgcacaatataatgtgtccaagccgaataaaatttccatttggtgaaatctaaaatctaaagtggtgagtcacctactatacctttaatcaaatggatcccccaaacaggtggaatttcgtctttttcttacaatgtacttttagtaaactatcagaagaaaatctaaggttttagatattctaggtcaatttgcatgaacccaagttcttgccccaacagaggcagaatacacatcagcctaactgacattcacaatctctcctacacagggggtcagctccagcttcttctcttctgtactgtagactcaggccccactgacactgcattttcaactatttagggaaaactagagatttctggttattactgcagagacaagaaattctatcaattatcactcaataattagtgttaatagacacttgatgaaacatgtcaggatataatttttggcttttctctttggaccctctctataactgaaggggaaggtagaagagatactctaatgaacatgctggctgtgataggctggtaagcagaggcttagggtcacaactggattaaggtagtgaggctatatcatataaacatggtccatggtttctactgagagggccagaaggggaccaaaggtctgaactgctgcatggtacagttcatcattgaatcacaactgtggactcacagatttcacagacaatactaggaaaaatctggcaaattgcctaaagttctaggactttgataatctgccctcccacatctgcctgccactgcccctcagaacacttgcaataggcaaagacttcctcttctccccaaggcactattccttctttcaaattattaaaagaaagttatagcttctgggaattttataaccttggttactgagaaccacaccatcaatatatatatatatatatatatatatatatatatttttttttttggtaagcctagggtagaatttggcattggaagagaggattgtccaacctttaagatgcatttttaacagtaaaataatatattttaagtgctatttattctttaaaaattttatacatgtgtgcaatgtatcttgaatatatccatagctatggttgtggccaaagtaattcaagcaatggataaggaactaatatagttttactatgagtatttgtctttgtggagtcgatggctgtcagcccacacaggtactcagcaatcaaagcagaataataagaatttccatgcctttcaacattagtcatttttctctggcagaacttcttccagtcacttacaggcatatggtaagaagagttaactaagagttgcttcactgtgctacagcaaaccagaatgagttttccacctttgttttgatgccctgagattcactgccattcttaatctttattttttttaagaaataaatgaatttttaaggatttctagatcactattttccattatgctggcactcagttccagcccaagaatgaccaacataagatagaaatattttggtactgaggtatttctgggtgggttgtgtgctttctagacttccttctccattatccagaggattcaacttgtgtgatgtgtgctaaggaaacaggagtgggcttgagttcataaatgcaggtaagatgtagtatgtgttattgacagttagagcaatgtctgtgctatcaaaacatgctctaattttgcatatgtttgcatatgtttctcctgaattctatcacgacgactcttagacacttctttctgggacagcccatctatgttttatattctgcatctatctaatcaggcttactacctttttagctgcttactcaaacaacaccgtgtctgccccatattactgtgagatcctcctaaatgcaactctgacttttcatcttgtccaccaccccagtctaatctctacatgccattggagtgatattttaaagcacagtggtgatcatatttaagttcttggattgaaactccttgtaatgaaacctagtcttttctaagcttttcatgtcttcattgagattccttccctgaatgctacccacaatgctccttccacagccatccctctcttcattcaagcgcctgcttcattgtcattccttctatagacacctgactaatataaatgatcctctagacatacacctgtcattggctttatttttcttaacagcattcattactatcagataacacatattcacttattttcctattaccctttgtctttgacttaagctcaatgatttatttctgcttttctagttcttaacaatagtatgtatatcctaagagttcggtagatatttgtttactaaaggaataattgatattgtctctggtaggttaaatttgcagtttaaaaaattgcagatgttgagtagtctaaagcaggcaacttctcatgtctaagagaattctcttttatagacagagcccacaataattcctgacaatgctttcctactgactggtagagagggatgtgggtgggataatggatgtcagagtgcacattaaatgtaaagacattcagttcttttgttacaaataattggcatgctgatgagaaagggcttaagggtctcctgaacaggatatactttatgtttaacagatgtgtgctccagaagttgatgctatttgtgtaggtaaataggctttgaaacctttctcctctgattgatgaggcttggaatttcagtaggagagtgctgagtgtgtcctgatagtcctagaaccaccatgggtataagaggtggtatagaacgaagttctttagaatttccattttgaagcaggaaatgcaaacataagtggaatttttagaacttgtagaataaaaattatcaaaaggatgaatcactaattgctaattatgagacaaagcaaaaagcatgctcagataagaaggtagaattgctgtttcaaatactgagcagggttgccacaaatgatgatattcttaggctgatacatgttataggtctgctttgtacccttcccagatctgttcttggggcttctgtggttgtcaggggaaaattttcatgctgccaagtgaatggaaccttctcagggtgacgggggcacttctcacacccgagtaacttgatgttttcttgctcctttgggcctgagcacagtaagaagtgaagtctaccttataactaaggaatcactcactcatctagtgacttctcatctcaggcttttatagaccaagggggtccagggtcagtgccaggtaagcttcaatgagtttagtgccagaaagataggttctgactaatgacatttactgcaactcacaggcatatctcttcttagctttctgtgacttttggggtctaatgggcttctataatccacttcttgctactgcttatactagaagagtgggagggctatcggtttctatgatactcaaaatctatcaacacaataagcccttcagcaattgggtccatgttcctcctctgtatccatatccttgcatgtgttcccacttacgaatatgaacccaaactgctgccttctttgatagaaaagcaatggtccaatgtctccacaaataagatagcatgtgtcccttatgagttgtcactccagagatgacctcttgttggctctcctctagtgtccctagccaactgccatggtcacccttcaggtgtctgggctctgctgctcactggcatgaggtaactgtctagggtcttccatgcctgtcccttgctcagttgcccctttcctggaaggcaagttgtacattcagcattttaaaaacctttggagaaagatgtccttccaggagcataaattatatgccaaaaagtgtcctctctggaatgaacaaaaggcaccctatcgtctgggcagctgtcaagcataaggttcagctaacagccctggctggtctaactctggatttcgtatcagctggttatctaactcatctaactactaagctcatctagttctgctttatacactgctgcatggctgactcaggagccaccagggcctgcacaggggtgagctttgctggtctagagagtgtttctcattgtcctgtcttcaacttgaccttgagttatctctgtgtccttgctctcctgtctttcactttccagcttatttctcattaaattctcatatctaacccaatagtggggggggttgtaccactctagactaaaataacttaaaataacactaattatataacatctccccatttattctctcaaattctgggatgaagggaagcactagtattttcagcaaagcttaccatgcggctgatgacaatgctttgtctctgtcaacctctgaatcagttacttttttttttttggttttttactgcaaccctcccccaaagctacagctgcaaagtttcaagaaagtagtttcctaacataatttctattttagatgagccaaatttattatttaagatttcactctgaatagaatgagagtatgaagcttggctatgctaccaagagggacaaagagacagtaggatctaggaagggaagtcgaggccagagggcctgacatcctagctctgtgaggaaggtggctgtgggaaggaagatacttctggggcaatggcagagaagagagatgggatctgaacaagttgaaccatatggcactgaactttcgaaaagtagccaaagagaatctagttttcttggaattacaggctttggaattgaaatcaactatatccaagcttccatgatatagataattatacagtctgaactttctagtcactgaaacctcacatgtcactttgtgaaaagaaaagaattttattctgagagaacccttagtagactaccggggaagcaactttcatttttaccaccaaatgtttatatgacaacttcagtacagagctcacgagtccttaggaaaaatgattatagccatcagatacataacatgtggcatacacaagtactcacatacaacacagtgcatgcctagctggagacagtgaatgcatacacacataaatacagaaacagtggtagagttcgagcaagatgtttacccaggatgctttagtttagaaacacatcgacctcccttgagactcctctgtgctaagatcaaagcctgatttgttttgcctttttagtgttaggcactaaaaaaatggcttaataaataggagccatttctctgggggtgcctttcttctctggggtcctgtgaaaaggatgtaggaaaactttgagagaaagcttatctgcattcctaaaccccagatggggcggacttttggatatgtgaaaaactgagcttgagcccattaattgtgttaatgttctcatgtttctattcatgttcccctggatagcttcctttacccaatacactggctgaggaagaaggatggctggtgcaccattcttccatacagattctttgaatttccatatcatcgatgcacagggagcttaattacttagcatgttttctaggaggcacagtagtggaaagaatggcttgcttacttgtgtttatcttctggagtgaaatgtgcttttccagttgtctgcggagtttcacctctgctccatattttcctgtggtcccattgtcagccaggatgaagtgagaatgcatgctgttgagaacggtgagcttgctcatgggattggacatggtctggtatggccggactacctacaggtagcaaaatgaagccgaagttagagagaagaaaacaagatgtgagccagaggatgagagagactgaaagaaagcacagctgacaccctctttctggagctagagtagaaggaagattattggtaacatctcattagaaggaggactgaaagaagtgtttcttaccagatctacagttagtgcctttgctgtgttaaagagttgtacattgactactgtttcattcaaatgtttatcttgctactgagcaaaaacatcatcttaaatttaactaatgcatttctttcttctcttctttggtcatgtccatggtttaataggtactgtagaagtccttattctggagaatgggggtcagtttcaggagatggggaaggggcagttctttcttgttgctttgtttgttttcgttgttgttcactctcacttagcaaccagaaactctgttatttaaaatcagcaatatccttaataacatcccttaagtacaaaagagcttgactataaaataaccatctcatgagatgaaaatgaatcaggcctaaaaagttcatctctgttctgttctctgtctctgtctcctattcttattttaatttcataatgaaatgcactctgtaaaatagaacaatttcagcacagcctttgacatttttgctatcaaaagccatatccatcttgacctgttgctttttatatgggatctgtgttccatgttacaatcctacctgacatattatgtttattttgtagatggaaaggtaaagaaataggtgagttatccaaaaatttaggcaaataatcagaatttgcatccaggcctgattcaaaactctgagcttatgattttattctcatgctgcttagagtaaattgggcataaattatattggcaaactattgctaaaatatctaggttagagcttcaccagaaaaggaagaaaagaggctgttcaataggctcactgttacacagccccagcatggttacttctgcacaaaatcactgaaatggacaggacagaaatagatgctactgggctcttactttttttttgcctttgtacagtgcatccattaattatacagatgagatgcatttgcttcttccggcatgtaataactcagcatgtgatgctggagtaagattgagtcatgtgttaaaggcattacagggtgatttagtgagggcagttttcaatagcaaagagctcatgtaagtcattttttagaccttgatcctgattccaaacctacagtgcaatgttcctggaagatgaaatgtactcaataaactgaatgaataggcaaacccgagacaggcatgcttttgtttaaacctgggaaggcaatggatcttttcttttcagaattgttagggaactgatctgatttaaatttaaaatgtgtctatgattccgagcttttgaaatggcctccagtcctgttatatgtgttctagttctcagatatagaatataatgctaatgcccagtttcattttagttgcttctcattgatttcaaaagctgataaccttgatcattgctttgaataaccccatgggcagtagtcaattgctgccttgtccagaacagtgagtaggattcttccaaaagggtgatgcctgcattgggaagcctgtcctgtacgctgcagcactagaagaatgggtggcatgtggttgaggttgaaatttccatttgttgccactcatatttgatcataaaacattcatcctacaggggagtgcatgctaattaatattaatgcttggaggcttagcagaaagaccttcccctgttctgaaaatgcctgtgcactgcacaccaggcaaagggaaatgcattagtaatggtgctgattttcagtggcaggtcctgaggactcattgcccagggggtactgagggcacagcaggggaaactggagtttggggggttaaacagtgtgtgatagttctatctccccttccccaactttaagttctgaatctacttaaagactattagtaaaagtaatttcaagggggaaaagaaaagtaataaagacctctgtgaactaagctgagtatatcacaaaataaaaggcaattacattgtcttcctgtgaccaccacatctctttcctccattattgagtcctaatttcactggtgcttcagtctttgggcgtgtgacaaccctttcttgtgaaatacagctcagatgtgcttagggggttctatacatctgcagattttgatttcttcattatctgaatcttattttgatctcatcatgtgtagcaagttataggttgccatatttaggcagagaggttgtctgctgaacaatagaggatataaatctgaaaaactgagaaaaattcccacgtatttctctcttctttggaggaagctttacagagtcctggagcatccccaacaacataatcaaggaaggaattgcagttctatccatgactgttgaaacctgagtctcttaatttgtaagaaggaaataataaccctactgacctcagggggactggtttagattacatgtgcaaagtaccaggcacaatatccagctcctaccaaactttctacaatattgattccttacctagctttgcttaatcttaccaactatatacttcaggctctaaaccagagatccaaacatgatatggaataaattactcacttttgatttaaatcaatgtaaagagaggaagaaaatcaaccatctgttggcaaaatatgttaagtatgtctaattttcacatcccccaggcatctaagaaggcgatggtgtggaactatttgttgattaactgaaagtttggaaataatttacaagtacttcagagaaacgcattttggtttaacttgcctacagaatccatttaatattctttgttataaacatgtcctcggtccctttctatttgagttacagtctgcatatatacaaatatttcctgatcttgtgtgttttccaaatagaacaaatactgctttttaaataacagtaataaataacagtaataaatatttaaattcatttaaatacaaatgaatttacagagagaggatggctgtctttggaagcatgtgttggtatgatggtgatgtttttacgggggcactggatgaccatggatgcttctcagtgggggcttggtgagaaagttaagtcataaagatccataacttccaaggggtaagatgttcactttgtttcccaagaaatcaggagagtggaagtcatgtactccttcttggaagaattgagaaggcagactctcaaatcattttctccatttctttattgagatcataagctgaattgaggaatgttgaatgaaaggccttttaatcactcttcatgactgataagtaagtctacttacaagtggactctagaccctttctcttctctgaccatcactggccacagtgtgtataaataaggattttttcttgtctcaattgcgtaccatttagtattgcactaggtgtttgatagaattctggctcatgcctctacatacaccttagctctgacagagaacacctctgaggagtgggatattgcaagagtttatacaaggcgttagcaggaagtgccctttatgtgctagtcataggctgctgcatttatattctgcacatgggcttaaatcaggcattgcaggctgctttaccatagctgctggagtttttctaagtatgttcaggcatgtcatggtctcatttaggagtatttacaggaaatcatcatctagggactatagtttagtttctatagctactaccttgtaacattggggagatatctgaagtcactgctcattacttcataaatttctggaggaaatgcaacctgtgatggcagtatgctgacatgcatgatggtaccagaggaccatcaccgtacatgatcatgtcaagataatgtctcttaataaatgttcaagataggctgagttttcttatctgtcaagtatcggacttatagctcctggaagcttttttcctctaatgcctgagtctgtaaaagtcgtgttagaaagcatacttctaattcaagtcagtggagaacagaggcctaaaatgagtattggctacaaaagtaaagtcacattccctctcaagcattgcagtcttgtctctcttgtggtgctttgtacagtgccatggcaatttgattacctgagattccttttcctaacaaaattgagtttgttaggaaattattccaagaaggagtacatgacttccactctcctgatttcttgggaatgagttgggataaattagggttttaggtcatcgatcagaggccctctacagttccaagtccatgtcttagtgtttgcgtgtcaacatgccccaaacaaacagcagagttggggatagaaggccagaagactcatctcatcatactagcaacatagtcttaatttagaccagaagcaaatgagcattcattgaccatgtctggtgtgctatgctctgtgaggacaagatcccatggagtaatgttttgtctttattttatccagggaactgtaaggttttgaaatgtgaggtgtcttggtcaaatgtgtcccatcattcattcatgtcttgatctgaagttcttttataagccagcacatgttaggcagaaaaaggcagaactggctcattttaaatttatagaggatgctgtggttggctttgctgctgggcattttttgttactggtggaatccttcaaacagctgagcacactgtttctgatagaggcatctagaatggttatttaggagatcagggaaggtatcagcagggggccagatggggttgtactttggtgagagagaaaggaaaggtgtgttgagattctctaaggattctggcatctgtgactaccagggagaaggggtgggtattgctgagaagtgggaagtaactttgtgtcagagataaaggaccatggggactgagaatgaaatgagaaaaaggcaggcttcctaggccttcacaatcagaggggcatcagccttcggggcactggctgcacatttcatggtcagtcagtgcagctgttaagtttgagtataaagcaagcgactctgaaacccaggtgctacctatctgctcagcagtccacacgaggagccagtccacccaaggacctattttcaaagagcacacagatccctgagctgtgggatccacactaaaagccaggagcacatcaattttgttttcctgtaaccctttgaaaatgtgcccctcagtgtgtgtcacccagaaagttctgtggccctcatttcatactgtacacttggatggactcacctccctttggccattcactactctgaagagggttcatttctctagaagtcaccatggccataacaggggtggatttaaacagtattcagaagttccttgaaactcttctctcactctgtgtgggatacagtgactcacttctaagggacaaggtaaacactgatagtgcgtaaccttagatttgccctgtcagataatttactctggagaaagccagtaccatgttggtaaaatggtttcacagctctatgaagaggtatacatgaccaggaacaacatacagcaccagacaagtgagtgtgctgtgaagacggcgcagtagcttcagactatagagctgccatttcatcattgcctcacctgcatccagagctttccagataggccattcacaaactcctccccaagcaacagagaaaccagtgttttattacttaagccatgaagtttgaaggttgtttttatgcatccatagataaaacgatcttgtattattattgtctttctttggaactttaaaatatacattctcctttcctggattgtttgatgtaaataatttcatgcctgctggtaccctctgcctttaggcatgactcctcagtgttgcctggaattcctgccctgtgctttagatcagttttgatgtgtgttccctgggtggtgatcagcatcctccagtctcttcatattgctgaccgaatctgccccctcccacactttctacttggcagatggtcagacttctgttcttgttagtagcttagagtgaatctacaaaatgtatgttttctgtgtctccctatataaattaaagctagtattacaatcatcttattgagataaaatcccccatatgcaatggttcaacttgtatgaaggtacaaaaggtaatacagattcagtagcaactaccaagtttttgtgggttagtgatattctatcataatcctttgtagtggcagcaaaccatagcatccaggtacgcatatgattagaaaggtaagggttgatttagtacccttcaatgtcttgtggccactaaactatactaaccattcaacacttagcttcaaaaaggctcaactgtaggctaatgtaagtatcccaagcagtccaatgctgactggcctaaactatgatgttcattgggttaggcatatttaaatgggtttcaatttatattactcacgactcacaaagggattatggtacataatcccaccacaatatactctaaagagtaactgagacacaaacattaaagaatgatgcactcaaatcagcgatagctgttaggatagaaaagtaatatcgcttagcagataaaggtacagtattggtggtcttggtttaaatcccagccacatccttcactggtcatggaacacctggaaattgacttaactttgcttttttgaaaaaactaattgagatttttttttatgtgtatgggtttttgcgtacatatatgcctgtgtaccatgtatgcagtgccttagaaactggaagatggtaacagatgccctgagactagagttatagatagttgtgagctgccacatgggtgctgggattcaatcctgatcctcctgaagtatagccagtgtgcttaaccactgagccatctttgcagccccagttgacttaatgacttagtgactaggtttgctgtcaataaaatagccataatgagtgatacttatttatgagcaccctgtggagagttaaatgagtttttatgcaagtacctgctatctggtgattcttaggaagaagtacaaaactgttaatataataactgataatgacaagctttcatgctaaaatccttttaatatctcaacacaacctgccaagtatagattcttccctcttcttcagttgcatgtggtgtacaggtgctatttcttttcttcctcctaagctctggactctttgccacctcaccaaccttctaggttaatttttgcagaattatcctctgtctttgcataaatccccttctatgaccaatatgtgatgaaactctctcttgtcttgaggaaaagtccctcattgtgtgattctcatgaactacctcatctattttccttattcattgaagccccaataccaaatatttctctaatgcctcatatcatgacttccataggccaccccacctctctcctgttccctgaaacatcagaccatctccgctgctttattccctcacactgactcccatggatggcccatctctctcagtgccatctatgctgcctttcttcttgtgaatgtgcttacccttttgtcacgccactaaatccgttttgatcaatatgccagcatttctaaataacagttccaattccccaccctcctcagtctatcattagcatttggctccttttgctctgcctttctgaagcacagtcttcccctggtctccaaaactttctgttctgttctgttcctacatctcagccattcatatgtaccctttgcttgctttttcccctctgcttggccactaagttgtggcgacccttaggaactaggccttgttttcctcactatacactttctcatggttataccaaccactggggtggtctgatttgccatctatctgagatgacctccaaatctaagctcgtaggccaatctttctgcttttgcctcccatactgagagcttgccagaaattctcctggaaatgtctcaaaggaacttcaaagtgaacatgctcaaatccaaattcatcattaccttcaaccaaacttcatttctgacagaagttatcctaacagttgccttggcagtttgcccagaatctgtgtggtctaggctcagcaagctttggctctatcctatacaactaacagatgtaggtatgtttccttgcctccaacccttccactaacattttttgggtagatcttatctaacccagtcatagaaatccaacaaatctcatgctgggaccaccattgggatgttttatgaatttatggtatgaagtcatatttggcttgcccccaagacaaccaaggaatgtgctgagttgattactgcattcagttcagcaatcaattacgttatggaccttagtggttcttggcttaaactgcaaagatagcagtaaaaggacactttcataagaattctcaaaggagataaacttataatttattgaagaacaacattgaataaaaacatagtttaaaaatttaatatatcagaaaatctgccaaacataatgctcatcattaagttaaaataaaaacataggtctgcatctgattatagatttggtaagtgtctggttaatctggttcggtaaagatttcagaaaattttcagtcacctcctgtaattctggctaagttgttttctaaagtaaggaatataaatttaagtgagaattggaatttgctagaaattctttcctgaattcacactggaggtacttttataatgatctgtctaagccaagatttttttcaagacagtgaagagttttagttatctactgagtatattttcaagtttaatttgtaggagttaagatatttaaactaaattataattagcttctctagacataatcctgcggatactttgtagcacgaaaaaaagccatttctataactagggatgaagacatgaagtgttcaaatgtcctatcaatgccatgcattgtcatgcaaagtattatattcaggtttaataagaaactaaaccaaattgaattttccaggcacttttttttccctctgagacagtgtttctctgtgtctttggaggctgtactggaactaggtcttgtagaccaggctggtcctgaactcacagaaatctgcctgcctccagagtgctgggattaaaggcatgtgccactgctgcccggctccaagtactcttaataggtaaaatgaatttaaagtttatgcatccttccaccctaattttaacattgaaatcctagtctacaaggtgatggtgttaggaggtaattatgtcatgagggttgaaccctcaactgtggagactacttggataaagttcccattaaggagggacccatggagagatgaaattgtcatagagtggggaaagatatatcattacattgtatattactttctgatgaagtctagatcccatcatgcataatttatcttaattatggaatatttattgagattgatgctctagactgagttctgagaatcctgcctctgatatatgttgcccaggatattctcaaatttgagactctcctgccccagcctcttggctggtgtttacaggcattgaccaatatgtctggccttgtcttttcataagaacagtgcttttattctaatatgaaacttgaaaaacaaacactattataacaaaagagaatagtaaattctatgcatcctcctgttcatcagctttgggagaataaagcagcagagtggtcaaacttcaataaaccttggtcacagatttattgaaaaactagatgaccattatgtttttcagtgtgtcatgtaacctgccattttaatttccattgaaaaaagaaattttgactatatatattttaaaaatgcaattgatcatgtgagttgactgtatactcgtggggttcaccatggatttctccatgtgcatatagcatagactgatcaaatttcattttctccttttcaatcacccattcatcctaatctctggtgatcattcttatatcaacatttaaaaagcttctacatataagagagaccatggtatgctttactttctgtgtcttgcttattttccctgatgtcaccaattccattttactgcaaatgacaggatctcattcttctttatggtcaggtttttagtttttgaggaacatctatattgttctgcataatggttgggataatctgtattaccatcaccagtatatgagtttctttctgcatatctttgccggatttttaaattattttataatacctgttttcactgtggttaggatttacagttccctgatggctaataaagctttttggtgtttcaatatgttaagtagctagattattttcccattttcaagtaagatgatttgcttaggtcttttttagtttccaagtattctagctgttaccactttgtcagagaaggaatggcaaatatttcttctagttctgtaggctgcctattcattctgttgcttctcatgctgtggagacatttttgagtttgatttcatcccaaatagtcaactttttcttttgtttcctgccattacagaccctctgctgaaacccacaacccctaagggggccttgaaaggcttcctccttttcaaattctagtggcttcagatctcattaagcctttgatcccaacaccccatttcaatgattctcttcttacatattatcttgtatgatttccccttcctctatgactccaagtttctcctaactccctttgcatctggtttcatcctgagcagagagtgagagataaggacacaatttgaatcctttgtttggggatatgcactcttagccccatttctccagtgagcattttgggggcctctggtaagcaatggcaaccctgttcaggttcattgtgctacttgtttctatttgccagtgccatggtgtctaggacatggctgctccacagtagatcttgaaatcagattttgtgatgtttctagcttttatccactcaagattcttttgactatctggggttctgtggttccatatagacattaaggtcattatttctagttctgtgaagaatgccatttgtatagggcttacattgagtggaaggtatgtttaaagaatactaattcctccaatccacaaacgtgagaagcttttacatttttaatgtcttcttaaatatatttcagcagtgtcttaaaattattgtcctataattattattgagttctttcactcccttgattgttcctcagcattagtttggcagatatccattgcactgtccagagtctagacagtaagtgctggtcgggttctttctgtgttgcgatactaatgctctaatggacatctagtgcatttaggtcacagtcaatctgggatgttgcagacccccagcatcgactttataacccttaaagcagttgtaacttcaaagagagctatagcacctttgatatgtgctgggaagttctactcacataccttggatttcacacttcttttcattttacttttcttccagctctcctagttctctgtgagctgcggattgtttttattagatctctaggatcacgaaggatgaatgcatacaatttatgggttatatgagccctttctctaccctctaggctggcatctctcagccctactatcatgtgtacattcctatttgcatatgatagagaagtgataagaagaagaaaatgaaccaggactgagtgttccaactcacaagggagaaataaacagcagtcttgcttcctgccatcctatggcattcacaaggtcaacaaacatggaataggataggccagcattctctgcctgtgtttaggccaatgaggttattatcttgttacagagtcatgaaaacaaatacacagctatcacttattcatagttgatatgaatgagaagttctagaaccgcaacgctaattgaataataatgtttgtgatagagatactgaagccatgaaacttccaagccatcctaacacttgaaataactaatttataacttaatgtttgttatactttaaaaatcagcatttacttcaaatccaacttggagtttgaggaaagtttggtctgtgaaaagctagtctcagatactctgcaacattcatatatacctactttcccagtcagctctacttacttcacagtttggggattgcaggctgcaacatacaaaggtatgtaatgtgaagcatccaggaaagtttagccaagaaacccctatcctggtatctctctcctccatcccatgtttctctgctaaatttgcatttctatatattatttggtagtgttggtcttgcgcaactttggtatcccttcaagaatctgtacttaggtttcatgacattagaaaatgtctatatggtgtgagaatgataagattctactgcacagtctaataataaaataatcagttttgaaccagttggttcttaggcgttagtatcttatttttggctccaacagatctcttgattaaaaaaaactatttgcataaatgttttactctctgtcagactttgattaaagagtgaattgatttaatgtactgaataatgataaaaatcttacagagttattggagaaataaactataatcacctgatcattagtttatcaattctgattgatgcacttttgagaagttatatagagggcaatgtcgttaggaacatggcaaaaactgtttatgttttataagaaggttccttggggcgggggggggggcggaacagaaataaaatcatgacctagaataaaaaggggggatgctctagatttctacttctggttagtttgtggccctgaacatatgaaaaagaaacagaaaaatcttttgtagtttgtctagggcattttaaggcaagatggaaatatatcatagccaagcatttagcaaaaggaggggctaacaagggaagtcatgactttttgtttgtttgtttttagagacagggtttctctgtggctttgaaggctttcctggaactagctcttgtagaccacgctggtctcgaactcacagagatccgcctgcctctgcttccctggtgctggaattaaaggcctgcaccaccaccactggtggggaagtcatggctttgaaaggaaggcatttcctatggcttttctcagttgggaaatgagtatgctaatgctacaaaagccagtaccttgcagtgggagagtcctgctctgatggagcactgctcttgtggactaccactctgatggaccagccagttcatgttgcctgatgttaatatggcataaatgcaggttgatattgccatgccaagaacatgtggtttgagcagaggcagagcaagttggtaggtcttatatttgacttttcttggttgggagaattgccaaggagtttatctagatagtttggaaaccaagtaatcatttagtaagtctttcataatacaagcttgactttgagaggtggactcaaaagttttatcctatatgtattatagatgctagaagtcaaataatagagcattcattcctcaggacttacatctcttccaatcaggtcctcctggttttccacaattccccagggggcgatacctatggtacatatcttccctcgagatttagatgcatggtccttcaaggcatctccaacatgacgaatgacgcctaggagcagagagagagaggtattaaccttgtctttgaagggcagtgactttcctgtcattctgcaggaaattaatgagtgtttttaacttggggagagtgttgaacatataattttgacacatttctataaaaactacatttaaagagacttcataagagtggctataatgcagatatatttgtcagattcaattaaaattcaagcaattatttcttttaattcatatggaaaaacaatatctagtgtctataaagaataaatatcattagaggacccttttcctgtaagcatagtgatttataagtatccttgcatcctttgaataaaaagaacaaaagttaatttattccatagtctgtgaaagaattaggatcatttctgtagtcatttgcttaagattttattaacctcaatttctgcctcctatttatatcacataatgtggaaagcctagtaataatgctgtcttactcaatggtaaatttatgttaaaatgtgtaagtacacctttaatattcatcgttctatttgtttcctccttaatgattgcctcacagttaaaagcaaagaaattcagattgcagcagtaaggaacctgatctcactttaagaaagcacttaaaggatatgcaatttctaatcgtttagcttccttctatagcaatcgtttctaaacatgaattgtaagatacattttctaagaatttagacttatcaacattctccccattccccaagaagtattcatcctcagtgccatcccttctattaatataatttgatataatttcttatacatataatagtttgtgagtccccaacagctccatgtttcactgctgcattgtccaatgttgcataatagcatgtaagacgtgcttgctctctgacaggaggatggaatggccagtgtattactcagcttgtgggccttgaggggcagtctgactccagaaaccatgcattgaacagggagacagaacacaccaagaagtttcaccatggagatatcatacatatttcaataactcatctgtgaagtagacatgagatcagacaagagtttctttttagtaatcaaataaaactatacttgagtactaaccaacagtgtgctgtgttgtgagcctggggagatgctcttcttacctgttagcctgccaatgtatcatctaagtaaaaatattgctgaataaaagattcagacaagaaaataaatccataaatattaatgttaatatgcaaaacacatcagggttgggttggacaaaaaatccaacattatggtttgcctctctgtctgccatggttttctctacctgctaccagcttcaacagtcagcatcaaagtcccatactctaaaactgagaataactgtttatacaccccccaccccaattttgaacgcatttcataaaagaaaaacaactagcaaaccaactttctaaatatagaaaattggttaaaatttctttcgagccttcattgagtaggtctctctataccaggaaggcaaaagcctaagcaattacaagcaagtgctttctacatagtgaagagaaaaatgtggagcctaaaatctggagtcactaaaattgctctttttataggatccacaataagagctgactgagcaggtcagccgaagatgttggcagctgatgggctgggttgggatttaacaacacaatacagggcgtggaccatctgcacagttctctgccaaaacatgcctgtttagctatgtgctgacttctcacgaattctagctatgcaggagatttcacagctttgatgtcacttaaatatctccaagctaaaactcaattattgtttaataagaacgtgttaattggtttagagtcatgaactctggatgtctcactaatatcaaatgtgccacgtgtataggctttgagccttatgacacatttgcattagcttattacaaagttactaggatacttttgctattgcttttgggggggtctctccctggccccttctcaagccctggctattctgaatctcattattttagatcaggctggcctcagagatccagctgcctgtggatgctgagttctggcattaagggcatgtaccaccatgcctggcattggtatgcttttaggaggaatttctgattcagggtatctggtaacaaagtttgctccattatttgttgcatactaaccacgttctgaagatagaaacctaactgtaagttagaattgatttgatgacatgcgtgtatcataatatgaaaatttatatggcagacagggaaaggtattgggaatcttttgtgctttggaattaatcatctatgtagaatgttttaagaaacatttaacattataaatgaagagatgtgcagtggttaggagcatctcctgctcttgcagaggatcagagtttggtttctaagtatccatgttgggtagttcacagatgcctataaaaccagatccaagaaggatgcaatgcttctggcttctaagggcactatgctaatgtgtattctcgcacacacatgcatataactcaaaagaaaatattttaaataatcatgtgttatctatacttaaccttatagtcatgccacaggtgaaatgacattgaaaaattagtctgggaaggtgcccattggataagattctgagtttgaatcatcagagcccatgtgaaagccaggtatggtagcagtatgagcatctgtagcatgcctatagagagatggatggcagagaatggagagtcaccgaaggatcacaggtcagctagcctgatgtatacaggagtggacaacagagaaactctgcctcaacaagagtgaacaaacaccagagaaaccctgtcttaacaaggactgacacctgaagttgtctgactacatgcagtagtcatgtcatgtagtagctatggcatatacaatctctctctctctctctgtctctctctctttgtctctgtctctctgtctctctgtctctctgtctctctctctctctctctccacacacacacacacacttaaaaaagttagttggtaccaagcttgaaattacttaaacaatacaggcagacattccaatttaaaataaaaacttatttgttaaagagttagttgatacctatgataatttgacctactaaaaacatcctgagaatttccattagtcttgtatacaaattctttaagccattgaatagtaaagccatttctcatatgcagttcttcttagttgaaaataatctgcatagccatcactcaggcagagaagggatgagtaggaggatggacatgtatgacagagacaaggtagagaaatatggacattttcagtgaggcaaaattattctagacacaacagcatcggagctgcctttcttcttcccactctgattacctgtgttaacccctcccgtgaagatccatgctccggttgtcatggctgctttgatgagccctttcccgaagacttgcttgagtttgggctggagttcaaagttctgcagccctccatgcacagagatgagaagtttggggagctccagttgccattccttggtcatcaggtgtagcaagagatcaggtttcgtatcaaaagatactcggacatactagaataaagatggacaattagggagatgggcaggactgcttggggctgtttgtctttgtgacagttatatgtgcctgacttgaaaaaaatgtcttatgtgaaatgtcttatctttaccaaaagagaccttaggagacaaagggattcacacatttaaaggttttgttgaaaatgagttatttccaatttgaaaattacttgagttttacaaaatgcagcttaaatattatttttcctggtgagctctttacttaaaacaaattatgttgacattttaccattgtttatattcgtacaaatacttcaaacattactaatattttcaatatgatcaatccctttaaataaactagatgtcgatataactatgactttgtgttcttgtgatcctgttgtgattttgatattctagaagactctaaagttctacataatacaatgaaaaaattatcaggcaatatcaggttatacttaactgtaaatgtatctcaaatagcctattatctacctaagtaaaatccatgtatctatcatctctctttatttgtctatttaatttttatgagacagtatgtagctataactggcctagagcatgctatttagatcaggctgacttcaaactcagtgatcctcctggtttcatcttctaagtgctgagataagagataccacacccatcccaaatgttttatctttaaaagagcagtgacagaagacatgcaggtattcctatagttgaaaatttgtagcagaaaattctaagtatatataacaaatgccataagtacaatgataatatataggacccacaggttttagttcaactacatagttgatatataagacaatataagaaaatctttggaaatatactgacttgacatgaaatgcagagatactcagtgtctaacaaaagtctgcttgggggcacaaagcaaagctggacatgaaaggctctcccaagcccttcaacatctgacctgaagactttctgaagtctggggtagtccttgcagagccccatagaaagctggtacacatcaaagtgctcaactctgaaacattactagagaaaactaaggaactatgtaagagaaggctgtaggaaacttgcttacctcagccatggaaggctgagggaggttctgggtagactgaaaaagaattcccatttgattattacctaagcatgagcaggtccctacacagatttgccatctgtactcttagtgtggtttgagacctaggaaatggtatgttaatgtcaattgtttttggcagagtggtagctccaggtaagcagcagaagcaaacacaggccctttgtggaggatatgtaataaatccaggttggaaatagttgcatgccaacagatagctgagctaaaccctttgagacagtgagatggtcatagaatatgaaacagacacatttgccatcttatatatggatatcaaaacaaggaagaagaagctataacaaccacgggcatttgaaaacctagaacaacttgcagaaattaaagtgtaatactgtaagtgaaactagcatgcaaaaaccatattgacaatggttcttaaaaattagccacatgtagcctagaaagatgaaggtttggaaaaatacacagaaaaacagaaacaactaaagatgctcaggcgaaattctagataaacatgaaagagcactgcttgaggaggcattggcagactatttctcagaaataccaaaggataccaattctcaggtccaggagctcaatggatcctggaaggataaatgataggaaacctcagtcatgagatacacagaaagtatcacctatgaagattgtagactagacgcccactcctcaactgcagcaatggaagctaaagccaagagaaatggcctgtcggtctagagctccacattttcaggggaaaaaactgacgtattttcttttcaaaactgggagaatacatagccattttatgaatgccaacattgaagtagagttgaagcctatatgatccaaaattatgatctcaaacacaaggtgggatgtaatagtaactacatggtaaatataaaagcatgtgggttgcataatataaagcagttatcatgcttaatttatagtgtaaagggatagaaataaggcatcaggcaaagattagtaatcaaaataataacaataagtacatattacatgggggatgtatctcagttgtagaatgtgtgcctgaagctcttggtttgatacttagaaccacctaaacagaatgtgatggtacatgcctgtaatcccaaaatttgaggggttcaggcaggtggtgcagaagtttggagccattgtgaactacatgagatgctgtctcaaaaaaaaaaaatcaaaataacaagaacaaaaataaatgctgggtccttgagatggatcggggtataaagcactttcttcacaccaagcctgaggacctgagctcagtccttgggattgcatgtagaaggaaagtaccaactcccacaagttttctctggcctctgtgtggccactatggctcacacgcatgtgcacatgtgcatacatatatacccacagaaaattagcataaaattaattaaaaatttaaaaaagtgttgcatggtaaagaaaatgattaagtttgtggcacattacttataatcttcacttgtatggtggagacaggagttcaaagggctagccttggatacatagtgaatttgaggctaacctggattttatgaaatcctgtcttaaaaaaccaaattattaataacctttgggccaattacattcaagtctatttgtgtgtgtgtgtgtgtgtgtacatattcatttgtgtatgcacaagtgcatgcaagtgtggaccataagttaattttgagtatcttcctcaaccactacctttttatttttatacattcattaaattattttgtgtgtgtgtgcatgtgtgtgtgcacatgaacacatgtgtcacagtagaagtgtggaaattagaggacagcttggggagtagtttctctcctcccaccagggattcaattcaggtcatcagacttgctggcaaagcacctttacctactgaaccattttaccaagctctttcatacatccctttcaacttgaagcccactggtttggctggccaatgtagtccaagacatccccttttctctaccctcccagagctgggattactggtgtatgctattcaaggcttgttatgtgggtgctagtatttgaacttgggtttccatatttgtgtggcaagaactttaccaattgagacaactccctaagccctacaattcaattatttttgaggttagtaccaaggcccacatgtatatcaactgattcacatactattttgtaaacaactcttaaatagaactccaaaatgatgactaaggcaaaacacagaaaatacataagccagtaaaatagccagcagtcaagtattatctgtggcaatatgacttgtatattctttgctttaaaaaaaaataggcctggtagtgcaacaccaccatacacatgaacaaaatgtgctgctttttgacttttatacttcactcatgcctctaaggggcaggactctttgagctccattgtacacatatgagaccagcatcatacatatggttcactgttgatggaaaggtcactctgtgtggcctggattttgcattacaggtacatgtgtgctgagagttttacatgttccatctcatattcttcaatatttccagtgagatagaaaggctccatactgtttccaaactcatactactagtgggtcatgacaggctctgtatcctagctttgactctacagctttttcaaccttagagatataacttcctcttactcattctactttacataaaccaaatagtcttcaagttctaaggaggcatttctcaaaatggtgctttcacccaggcctgttcttggttctttccgctgctgtgttagctggcagtctattcccttaaagggtggcagcttgggttctggtacagcctccttgtgacttttctgccctatgaaacatgaacaggtcaatgggctgacttagtcctttgataatattctttattaacttaaatcattacatcttttgtaaactatcagggcaaataagtttccccttaatttggccttaccctcgctattggcagcttttcccacttctctgtgcattcggctaatgctgatccccaagtcctagggtaatgcactctgccctgtcactcatggaaatgacactcatctttcaaaagttcgcttcagtcccactgactgcctgagactgcccatgttgatgcaatgggactcttgctgaagcccagtgtgatatttctttctgggtgattcttctatgtaccactttctctcctgtgctacacgcttttgagttcagggccgagttgagctgcccatggtttttgttaagctttgtcagtattgctatgaagtatccacagtattatgagagatggttatgtaatcatgggattctggagatcatctacttcagctattccatttatagacccagggaagatacacagggaaggactcatagggatatcacatctagctatccaacagtcatttacttcattattatagccatattgttaaagctatgatgaaccctgagggctgaagataggctgggcttcttaacctttaaaatgtaaacattataggataggtaagccagtaaaaaatggagtttctgattcaataggtctcggctggagtttggatgtcttcacttctaacagctccctgtggtccacatgtgtgtaactcctgtccatataaaaagaggcctaaatagtgtgtagatggtctgagtattttcttaaatttatcttcagtgtagcagtttggagagatggagcctttaagagacagttaggtcatgaggacagtgtcttcctgaacagatgagtgttcttattgcagaagtgaggtccagagaaaaggatgagtttacttgcactcctgctgtggtcctgcgtgcacacagacatgtgttcttgctattccatctagtgcagtaggatggtactgaaagatgggcctcattggcaacaagcccctagaccctgaatgtcctattctccataacagtgaaaataagtttgttctttataaatttctcattctcagatattctgctacagcagcacaaggaaggactaaggcaacgtgtctgttatttagaaagtaaaatacacttaaatttcatgtggaaagcaaagagatgatagggtagaattaggcacaataaatgaaaaagtacaataattggcaagctgctcaaggaatctccactaacagtacccatcttcaccaggaccagttagttgttagccagagaacccaagattctgtacataccacacctaactatccagaatctggtgaaggtcacagacattctcaacttttagctattgtcaaaaatctgtgacttactctgcccttctcctgggaaacaaaaggcaagtatttaagtatatcagcatgcttcttaaagaaaacaatcagacaggactgacagcatttttcagatgaaggattatgctggttcattctatgttaacttgacaagctagagtcatctaggaaaaaagaaccttagctgagaatgtgccctcaccagatcaccctataagcaagcatatgaggcatttccttgattgatggattgatgagggcagtgtcatccctgaactagtgttgctctaatacagcagactgagcaagctatgaggagcaaaccagtaagctgtattactccacaacttacacttcagttcctgcctctgggttcctgccttgagttcctttcctgacttctctcaaggatggactgtgacatggaagtgtaagtcaaatagaccctcccaagtcacttttggtcatgacattttatcacagaaatagaagccctaattaagacaagaagttatagagcacaagatacagggaccatggatgaagtcatgggtttggaatctggagttagagttacctttcatgggaataagaaaaaccacagaaagtgctgcttcctattgattggcacctatgtggctgggcattactcactcaactctgtctacttccaccagtcaataaggaaataaataaataaataaataaataaataaaatcatttttggctattgtttagaaaatcaaatgaatggtttgggaggtaaaattgttattaaaatcagggcttgggcatcattttaaggttacctagagatttcaattaagtagaaacttttaaggttatattcccatgtgtgtagaaactagattattcatcatgcctctcagctgtgtataccaatgaactcacttgctgaatcagcagcttcacactaattgtgcccagagaaattagacaatccctattaaattgctaatgtgatttgaaatttggagctatttcagttgtcatgagaagcaatttaatttttttaaattttggggtgggatggcatatgtgttggcatacttgtggaggtgggagagaagcttgggagagtcagttctctccttttaccatgtaagtcccagggattgaattcgggtcatcaggcttggctgcaagcacctttagtcacctttagtctatgataagcaattttgatgttcattatgagtctatcaataactaagggatcacattgcaaataacaagacatctccctaacatgcattccaaatgtggttacctaggcattaccctgactcagtgctatttagaaatttccaactcattccattataagatgctaacagtattggtcattcagacaatgtgagtatctcacctgttatatgagatcaaccctgaccactgttcaggatactatatgggttaaactgtggaatatgtaatggccaagaagctccagtaagtgcaaagtaggtaaagattacttacagtcaatgtagacatagtgtgcctatgtataactgatctaagtcacatgcttttcaaaacaatctttattttctactctagttctgtgggtgtagggggaagccttgccctcccattacaatgggcctttaggtctccaactgatcaaacgagaagctgagatcaagtaagttatgcatgtctgtaatgacctgttcctttctcttcctgctgtcagctctcctgtctgacattagaaggcctgtgcatgtcaagtggatggcttttagaatgtgctgtgtaagacagaagctagatttagttgaaattgtatgattttatgctcttgagtaccactggaagtcaatgaatccagcattatcatttccatattactttccagacaataaactagaaattacattttgtgagactctgataggaaatgagagcgtctctttcatttgaatggagaagactttggtaaagacacctatagaggtcagctatgcctgatactggggttcctgtgctggacaggtgactttcctactgaattggctattactacgtcagcatttcaaatgcttctgtttacttatcaatgctatggagctcacagggtgtcaccaggcagtgttcttatccttccatcatatctacaggggataaagactagatggggtgaggatgaagtcattactacttagagcagatagagctgtttcctttaacaaaccaaccaaaagcctccataaacttctatcagcggtctcaacttgagcttcatagagcatttggttctgctaattcatcagtcacctcttcagccctagatttttacccatgtaactttgaccagctgttttaatgaaaatgaaaatgggctgcaggacaataaatcttgctacactcttggaaatgttcaatgacaaatcctctcctttcactgcaaagccaccattaattcttctaaagaaccatttggtacttcttaagcagtgtttgttctgattaatgggcctaccattgtgaaatctgttttaacactctcagcaatgcctttctttcaagctcatagtggggaaatgtggcccattctctctgttgagaaatgtgacaagcatcatttcattttccaatttttgtagccacatataaagggggtacttgtaattaaagctgcagccaagtacaatatgtcacatcagagataattctgccgatagcagtttcccaagttcacagagcctttgccttgcatccagagtttaatgcttacagtggttcagtagatggaagaatctcaccagaaaggaaacattcggaattcattcaatgcattcaaatttctaatttgatgacactcataacttgggaagtagaaatgtcattatttttgaagttttccaatgttatatatcaggtgtttgtttatatgattaatgttgataatgggaagctcaatagtgagaaataacatataatgtcactaagcacatacaggagtcacggaggctagtctatgggatttctgttagaattattcattatagcatttttctagaagcaaggaattgagacagttttctgaggagattcagcttcccttactttatatacctataatctgaatgggaaacatcaaccatactatccaccttaatttttttttgttgttgttttttcaagataggttttctctgtgtaactgtttaactgtcctggctgtcctggaacttgctttgtagatcagactggcctcaaactaacaaaagacctttcagcctctgcctccctagtgctgggattaatttgcatcctgtctttaccttaattcatttcagagagaccatctgatccatttgccagtttagcagccttcacagactgtaaggtggactggaaatcagtggggcaatcacaaagtttctccagagccccatcaggctggaggaagcttcctgttagtattagctgtagtgcagcgatgggctgctcatatgtatgaagaggaatcttttaaccacttcccacatggcatgtgttaatcaagggttaatcagataaaatttgcagaatgtaaagagagacaatttttaaacctcaaattcaatccttaaaactctctaagagtatatggttacagacaccatgctaacaggggtaacctccctactatgtggtcccctcccccagagctcagagagcaaggcgttcacccttgtggggccaataggtagagctttcagtgtgaaaacaagggctagggacaattttctaaattatatgaaaagtgtactgagggacaccccatgatctaatagatacattaagtagcagaggagagccagaagagaattgtgtggctggcttgagaggtttaactgcaaacccttaattaggtttagccttacctggcccacaagccagttttgcattaattagaagagatgatttgtaaacaaatgagtccatattctgctcactttataaatcatgcgggaacgaaccctcaatagacaagtctccaagaaacctcacaatctctgctgacagggccattttgtggatgtatcttaggaatgggcaggatgtcaggctctttccctcactgtcagcttggattggctccttcctatgtcatagtttctctctgcacagtgttggttaagcttggacaccgagttctcaacaccacaaagcacttgaaagaacttggcaactgattctaatgatctaagatgtaattttacaaagacttccccttgctcaaagctttccagtttaattaacctcattaaatattatcgatttaaaaattctgctacaaaacattataaaacccctattcaaagggtataagtacaatagtaattaacttcctttcaatcaccttcaaataacttccaaataaaacagtgactgtcatctgtccgaggcacacatgataaagaaaaaaagaaaatggaaaaggggtcattaggaagctgggtttaagaactttctctgggaaaataatttaccttcttggggcttcaattatctcacctatactgtaggacgaggggatggagattaaattttccaaggctggatgcacagtggaataactgctgtgtctatatccaatgatttcaccaaggctaatgaatgagactccagacgtgcctcttagatatggccttccttccctgttattttgtgcccccaagtcaagaaccgctgattatgacccccaagttcctttgatgcttaagggtctgtgatatactgccaccccacacatgtggtaggacagacacctagctatggctctcgcataactggaggcattttaataatgagtctgttcctcctgctgcctgcctcactgtgtgcagtccacctcagcatttggaaaatgctacagctgtatcctgggctgccttgaaggaaaaagttaatgttatatcttcccttaattaaagtaaataagtcaatcttgcccttagagtgtttcgatgactttgctaaaaatcacttcaaggacacctttcagaagtgatggcccaaaagtatattaagtttactggcctgtctaactgcagtttggagaataattaaccatacagtgctctcatgaagactgtttttttcccccccacaggaagtgggtgccaagtctgtctgtccaaactgcatgctggtttgctcaagaggttgggaagcaagggaggcttgggttggcaagcatccattgccctgcctcgtaaaatgaggcctgacagcaccacttctttgtttggacaggagaagcagaacaactctggggcgaactctcagagtgcacaagatgcttgtttgtgtctggatgaatgctgaggatttccactcactaaatacccagtagtaatgaaaagcaaagctggtcttcattaggctaattaggcttggacagaaagaaagggttgcccttagagtgactgcccttagaccacctagggccactctgacctcagggtcagcatcatagtatgtgcaatacagtgcccagaaatgcagtgcttagagttcactttcttgaggttttgtcttgaaattctgagaactgggatgtgtatctcagtggtagatacttgcagaccatgcatgggtttgatcatagctcccaacaaaatctgtgaatatgtatggggaaatgaaatctgagggtattgcaggatagtcggttgctcatttataatcacgactattattcattacaggccatgaaagaaattgccaaagtattttgctgaacattttgaaggacacatactaataacctcattttgagttttgctctccgggcttctgggggtggtctctcaagttcaccagaaattttcaggagatgaaaaggatttcctgtagaggaaagttatacaacaaaagggctcttgctgtgctcattctaacgtcacatccacagcaggttagcgacgggagaggaaaaggattaagataggaaggaccccaggtaacataactcattctgatttgctggtatgagtgactgctggggacagagagaatgtggacatcagttcacaaacttctagctagatttcctgatggtgagtgtcacaaatactgttttcacagagcagattaaactgtggggcaaaagaaagccaggacccctgtggaaatactctactggatctttggacttccaggaagtacaggaaattatttccctgactcatctctatcattttcatccatccattgaacactagctgcggatcaggggtctattgtcctcatgcatctcacagaaggcaactttaccagctttctaggaagagcacctgaggctcatataaattaaatggcttaacaaagagtttccagtcagacagtgagaatttatctagttcttcgactttaggagcacacttctattttgattgagtacaaagtttttctcagagtaaaaccttctgtagctttagcaccagccatcattcaaagcccttaatacacagaagcactgctaatccctgagatagttctacgaagtagaagttactacccctctttatatgcaaagaaactaaggcaccaggcttaaattgaacaatcacccaaccagcaagtgacagcaccaggctgtgaataaaatgccaatggattcctattcaaaagtcagccagtaagctacaaggtctaacctttcagaattatacatgtattgcctgaaaatgtaaattaaagtatatgaactaacaaaagcatggatcaaagggacatcctttaagggatgagtcgaatgtttctccaagttctttcagagcatggggaaaataagaatattaataatgcaggctaaattggttcacacccattggcatgcccagcattgtctaactttttcaacagccggaagcaagcctgctgaactacaaaacttccagaattttcagaaaacttgctttactttttattctttgaaaattctgcaagtcacattaagtgtagtccatgggaactagagtttagacatgacaaaatttctatatattttccaattcctcgctaaaggcattttcctttcccattgagaatattattaacccagctacttggagagaaggtactgatatggattacaagatctctgtcaagaccaggaaacatcctgggaaatgctgctaataaaacaaaatagaaacctaaaggaaacatattttttctctctctccaaatctagggtgatttagaaaaaggctaagtagacgagacatagaaaataacattacaaactgtaagtagcttcagaaaacaagccagattcagaaagacaagtatgaccttttctctcatacaagaagggcagagagtggtggatctgaacgtaagtaagagtggttgaaagaagctgataaaggtgctggttgggggaggtgggcagtgctgtgtgtacacatatagaaatgacattgaactgcatgatcatatacaatgatacatgttaatcaaagtaaaaattagctcatcgtgtgatcttataccaacaatttaaaaagtccctgctggggaaggtttctttctcctactttatagacattttactgggaagtgacaaggtcaggctagcctgaaatctacaacctaggctcttagctgttcctttacaggatgagaaatattgtgagtggcctttttaattttttttttttattaccatggctttgttggaatgaccgcctccttggaactcaatggttccaaaagcatctgttgggctgagctgagtatgtttgctgatggaccacttctcagactggatgtcatttcgggagagacgactctcatttttctcattctgaagcacagagatactgggagtgagtccgacatgttggcctatgaggcgcccacagcaacacctataacatgagaggttaaagtgaacctcttgaatcagccattattagaacatacactcaagcagccagttacagaaacccatggactgtgcggacccattccagttcagtggtaggtaaaatcccagaatgcagtcttatcagaaaagacagtggagggaggcttcccacaacactccatctactgctcttgcccaccacccagcttatctttatcaacatcctgttctccctccacccacaccttgaagtactctgaatattgtctgggagagggcaattgtgaaaaaaaaagttctctatattttctccacttttaactgctcccatctatgaaatcttgcatgaaggatactgaagagctcggagggtaaacttttaacatgtacatctaaatgaggaatctcacttacgtgtgagtcacaatctaacttgtctttccaactggtatttgttgtcaaatactcaattctgagaataaaaaaaaaaagctataggattttctttgaagaagaactgaaaaattggaaacttaaaatttttcccccatcatcaaaatgccttcatatgttatgatgaccataatcacaattattagtaatgatagttacatagcattctcttaaacactaacaatttaagatacactgataataaaatattgcagcactgaagcttaagcaatgtatccaacattgcgtatctagtctatagctgtaaaaatctgtattttaagccaccttttaaaatcgcccattcaaaaggcatttccattttagcttactgctttatatactgctgattttcaggaaggtaactacagtgccaaaaacgtgcagactaaaccctaattaaaaccctaggtgtctttcgttcaagactttcttttttactatagcaggacatgttggcaccaatgaaacagtttgaaaaaatgttaaggtagaaaataagtacttgcaacaaaaatatagtatgttgttatgtacagggatcaatctttctctaatagtgggtctgttactctgtgtacagacacttatctgaagataactttagccaagcatattaagcagttcaatatatatttgcttcaaatatatatttaacttgacagtggttcccttgcagtggtaataattactgttgtactctattcctataattaccacttcacattcttaatgtattaaagacaacaggattacctatgggggtctttggtgctgggtatgatgtgaacacattctcttttataaaatgctctttcaatccaggatttctgagcctaaaaaagagagagagaaagaagagagttgagcataaaattcaaaactttttttggctaggtagcaataccatgtaatcacacaatatactgtatatatcataaatgggttccacactgaatatcatccaaccagccattctcagaaccagctgcttgggttaacattataatattgagaattaaaggaaatagccaggctggaaaaagtgttagtaatgggaccgtagacttgttcattatgattcctaaaggacagaaacacaaggctattattcataaaggaaatggaattgaaggaacagaacatgacatttataatcttacatgaaaagattcaaaagtcagaggaaaaacatctagttctgtatcaggttttcatagttgaagcttctattagagtttccttacagaaggaaaggaaaatggcagaaggagtgcataattccaaatccttgctacaccactaaggttccttaaatccaagtttgtgatacagaagaaatggaaatgggaagacaaagaggagaaacataagcataacctcaaggctcctaggtaatacttgggaagggaatgggcacatttccctttacatcctacatacatgcacaaaagtatggcttcttagaaaaggtattgctgaaaccatccactcaggacccctgccatagagatggggttcctagatgggctaaggtcattctatcaaactgaaggatatttttcacgcaagcagcatctatcctgcacatacaagctatgggctgtagaacatattatccaaccataagtattaatgaagccctgcacttttgtagatgaaaacaccatgtcacaatgccagaagcctggagatcctggaccacttccttcagaaaaatttgaaacagaagagacatctccatgaaacctgctaaatttcttagaagattcctttacaagtatttaagatggatgtttctggaacaaaccttagctagttcatatgatatcacctcactgtcacacctaaaatcatattcttaaaacattctggcccaatgcacatttgaactgtcatcttgaaccatgacagtcactggtgggaactgataccagctcccactcactaggtgtaattagtcctgatttcctggacacacagtgctatctgagccttgtgagttctggtgttcacttattccctgatcccatacaatggaggtcggtgcatgcatgtggcatccagagcagtagttctttaatatttacaatcatggatattgtacacttggcgatttggaggacggttgagagccaccaaggcactgtattctgttccagtaatggtcacaatggggttacataatttctattttccctacattgtcttcatttaaaggagcattccacactgcctcaaaggtctccaggtccaagtgaacctctgcatcctcatgcacatagaaggcacttgaaattttgtttgcagcagggcatgaagagaaaaacaaacctcctctccaagagttcttaaaccagtagaaaaagctactggttccatctttgcaacagaaatgagctcagcagcaaagctaacccatctttatcttcgtaaaaagcctgtaaatgaaactattcatagcccattgtgctgaaaccctgaatactttcattgatgttatctgacgttcctcactggacatttgaaacccacttttcctacaccttggggaagagtggagaaagaatgtacttttgtagcccatcctggcaagccttcaaaagaatcttttggggcatcatctgcctgcttcagtgaatgctggcccatgttccaggagaggaagttggaaaagcagcgtgtgtgggatgtaatgtctacagcagagaaaagagcatgagtaggaccctcatagatgaggacagttaagaattctttttatcttcaatttccccatttgtatttgggtacaataataatgcatgacatattgggttgttattatttggggagtaccatgcttgacttcaagaagagactgaccttggcttgtgtttgtttattgagacaggttctcactctatatccctggttagcctggtaatcatgcttacacctagctggccttaaacttgcagcaatcactatcctgagccttccaagtacttagagtaaggcatgcaccatcatgccagacttctgggttgatcctcatactataaattcataggtcatatgtgggttctagaagatactggtaaaaatggccacccctatgtttgcatcataaagcactggactggccactaacaagatatgaagaaaagttactttctctgagcctcatgtatagcatatagatccctagttactaaggagggttttgtgataatcagactaagaatttcattttacacctagcacatagtaggagctcagcaaggatgcacagccactaacatttgtttaggttccattatgtacttagttccacagaagagcactggtggagagggaccatctaaaatactacatctattttatcaatgaaaaaaaaaatggggtcagggagatacagcgagttccaaagccacagtttgaccttgaacagctttgttccaggttctttctgctcagcccttggatataattgctttgctagaggagacggtactggttctgaatgtcctttaggggtgcagtgccatctgagatgcctgggaccacactgaactcctagtggcattcagagaactggttcagacttgtttcttccccttcctcctccccagtctagtcctcacacataggggtgggggtgaactctctgccacctgtgcttcctctccccttggggtaatggataggatgccactttaggaagactctaatacataagacagaagttaaagaaggggggaaatatttctgctgcagccaagaaatggtatcacaaccggactttaaacttgagaaaactgagggccatgccaaatgaatgtgactcttcaaggacactgttattattagtttcaatttgggaggtcttgcatgcatcagtaagatggtgtatagaaaagttattacatatggactgtcaatttgtttgttaatctttcaatggaaagtgatttggcttgtgtacagtccagcaacttaattacattctccaagaacaaaagcaacctccttgtgggtgaatggataagaaaccacttttgtttcttagtattagcagagtaatcagacaattgggaggaaaagagaggtgaggtaaaaagatcttcctgtccctcaaagcaaacttggactctttttgtttatgagatgagtataatttatcataggaagaaatgtttgcataacagacgacttaggacttcttcaaaacatgcataattgactctgctatattgttgggttggcttcattgtgcttttattcaggttgttagtgtggaaagatactcgatttaaattttgttttggaaagggcgtattttgatgtacaatcatggtttaacttgttgcctagatgaattccctttttcttttgtttaaggactttggtctactctgcatgaagctttagactttgctccaacatgcaaccaagttagtgcagaatgattactctcattgttagaaagcatgcaacacatctgacatgcatttcctgctaacttttcagttctcttctattgcaaaacttcagtggagagtttgccctacagttttgctttttaattatgccacagaagtctcctatcctcctatcagccctcagaaaatcacttctgttcattcttttctggaagtagactggtcagttaccaaaccactgtgtcagcggctgtttctttcttgtctttccgcactaccagccatgtgtgatgtgtaatagggaaacattttcaaaggctaataattaaaggacatcctctttttttaaaccagaaacaaggacatctgcattttgaacaaagtataatagttaccctaaggaataaaagcaagagctacttttgaaaattaaacatgtaaccagtaaggcatcaagatgaaagaaggcaaaacaaacctgtagatagtgtcttataccaaagaaacatcaagtcatttcatttaaacaggcttcactccttttcacccgatctctactatcgacattaaaccaccaacagttttgctatgtcttcctttacctccctcctagctgtagactcaactcttcctcaggagggaacagttgcaacacaaacttagcagctcagtcacccagacaggtaatccaaagactaaaaagaaaggaagatgaacttctagaaacaaagcatgagaatacttctcggtgctgctcgccatcacagtctccactttcaagaggccacccagtctttatcagaacaaaatactgaaatatatgttcatttccccttgtattctctccaccccctctgtgttcctttggtcttcctcgaagttcccacatccaacctggagaaggcaaacaagagaaagttcagctgaaattgtttacctgcgcaccgactctggctggtagctgggcagtccccttgcacagttcctgttgctttcattttgctgtgactggggctggccatcccgctaataatgctcggatgaccgcccactggaaaaaaaaagtcacttgccaggctcttcccccaagagacatttcaagtaagcaatgaacttgggcagattggcccccttggaatgtgcgggtgctccaggattagcctggctaagaatcccatggacattcactcacagttctcacacactgcttgatttgaacatctaatctgaagccagaagagaaacaaatccctggagagatcaggtttaaccagtgcaagtcctaactgcttcctaccccacccccaccttttctttttccattttcagagtagaaaaaaaaaaaaaaagcttgcaagagtgtgataaggtgctctgagttctgaaaagttctgctttggaaagtgaatctctctaaagaaacagtgtattaatgctcccagtagtttgaacacacaagaggcattgttccctggcccaacagaatgaaacgatagtatttctttaaagagaaactgttaaaaaccctcagtgtttcaaagggaccctctggtccctgaacatgagccccagaattcagttggggttggccagattgttaaccttccacaactagatgtcagtaaaacttgcctgatcacacctcttgtccacagccttcccctgcccagcacaaatgcacaagagacctgcattgcctgtttctttctatattgaaaagcgatcctcggagtgctccaaggctgtgggtacaggcaggaagtgaagaagcctatacaatgaggccatgtcttcaccaggagactcttgcctgcatcaggccacatagagggcactttgagagatcacccaagaaagaatgtttttgatgatagatattaactaggtaagcaaatacactggggagaaaagagttcaaatttcaataggcaaacaaactcttaagaagtgaatgtctaagcaccgtatctcttgccaagggctacagttaactaagaggtggtaccttcagcaggaagccatcctggctttaattggtgagggcagtgaggctttgattttcattttcctgttaccttgtatcagagtgaatagtacatttcatgtatacagtaaaatgacaatggtaaccaagcaacttatttcacacttggattagcccatgagccagccatctttactatctgtgctcttgcaggatcgaagatcgattcctatatttgctagtctttcactaagacataatcccacccccctgcacaccccccctagacaagggacaatcatccttccacctagtgactttcatggatgaaacatggtaaaaaagacttaagtgaatggcattaagctttaccatgaaacacaagaggaaatgcttggaaagtagattcagtttgctttgccagtgtggggtcctgagattgagtacccagaactcattgaaagctggacatcttgcctttcttctggaattccagcacttcagtggcaaaacatgaaacaaagataggacaatccttggacagtcagtctgggatatgcagcagtagacagcagagaacttgtctcaaacaaggtggaaaggtagggactggcacccgacgctgttccccgatcgccacacatgcatagtggcatatatgtgttctctgatctccctttctctctctctctctctctctctctctctctctctctctctctctctctctctctccaacacctcacacattattttcttttttgtagaagtcacaaatgtcccttacctgtccttaggaattagccacagccttgatgccatacagcctctgtgtacctgtgacccttaagtattcattcgaattgaaccattagagattgtctctacagctttgtgtagactctggaacttgaaactaaataaattatggtttatgccatttgatgatcacaacaatatttcagggagaaacacacattttcatgttgctatgtgaaaagcagaccacaaaaaaataggaagaaaatggcaaattttaaatagaaagatggttgccaactatgctacttttcattttatcccatttgcttttgagtttctcctggtccttgtgtacatgtgaagtcagaataacgcattttgtatttgcttttcagttatcaaattctgtcttatgctcacagaagggggcagggaaggtgctcaggataggacagtatttagaagttcaagaagaaagagaagaagggctccatagggagatcttggaaagtttttttttttttttttaaatatggggtaagatttctggagagacacaaagagaaaaaagaacagagagaattgagaggaaggaagaggaaggaaattgagaggggatatgataagtgggcagatatacactttgaaagatctactgagatgacagtgttgtcagttatgatactaaatcagttgcctttcagtaatcttcccaatgtagaaagactcaacaattcacctccttcaacaccttttgtcagtagatctctctgatagtcttttatcacgtttctatgcatttattgttaatttgttctagtcccattttggggggggttggttttgctagcttttcttttctaaatagaaatattcagcagaaaatagagtatgagttgctgctcatccatgcaacttacaccagagatgaaaccactgccacagagccctgggccttttgtgggccttaaaattggaagctccaggtgaagtcagcagaatggtgctttcacatgaggtagggaggaccctttgcttgaggaaagtaattagctccgaagagacttgcagctcagagctactttgcatagggatctcttcacacttataacattgttacccaaggtgcagctcccggaaggatctattaccaggctgcttcaggtatagtttttcgagcacttaaattctaacagtggatgtccacatgtacagtggtagctatggctcttctgcttttatgttaccacagaatgccgtattctccaaatttaccattaataaaacactacctctgaaaacactatattgaaaaagttttgttggcacacagttctttaaacaatgcaattagattttctatttgcagaaactcaatttttttttttttcgagacagggtttctctgtatagctttggagcctatcctggcactcgctctggagacctcaatttttaacatattacaatgcacactgtacttccataagtacctgcaaaaaatatgttctttgatgtttatttttggtaacaatgacaaagagcatgatggcatggctttagtgggtcagcaaacatttctagcaaaggtcagatagtatgtatttaaggacattaggggacagtgagtgcccacctcaataataaaccacttggttatcatgagggggacaaagtggctacaaacatgatcatagctgagtatgttttatttcaatgcagagggtagtaggcggaatctgatgtatactggtcaacctttgtaacagaaaaaaaccccaaacacagacaaataaaaagatgcattctacaatgggttctcaggggaggcagtggaggaactaaggctttgtggcaccaaccctcacttgtctctactcttcttcctgcatggcaggcaagctctcatcagttgactctgcttctcttgctttttcctgtgaaaggtaccccactccctagcagtctctggccatcctagccaaaggaacattgtgtcactctatcaagttatacctcctcccctagttcttgcatgtcccttactaagaagttcccaagggcagtaatttcagtgtgctaccacaatcggcatagcacttggaactgtggccactgggaggcacacagatgacctagaaaaccatttcacttcccaaagagcaaaaccttcccttagaaatggatggcatctggggctggagagatgactcagtggttaatagcactgggtgctcttctagaggccctgggttcaatttccagcacccacttggcagctcataactgtttgtaaccccagttccaggggatctggcagcctcacccagacatatgtataggcaaaacaccaattcacataaaatataaatgattaaattattaaaataaaaagaaatggatgtcatcagatggtcttgtgtctccaaaaaggaggcttaagggttaaccaggtaggaatttatgctgggtttacagcaatgcattaatgtaatgtataaggaagggatataactgataaaatatcatcatctgggggttacagatttttttttcttatttgaaagtgtatttaccaatcccagtggttcaggtccataatcccagctgctcaggtggctgaggcagggatatctttaaattcaaggtttccctgagcaacagtgtgagttcaacgatcgctttggcaaccgagggggactatctccaaataaaaagtgaaaagagtgctagaggtggaactcactggcagagtacttatctagaatgcataagacactagattaaatcctcagcactacaaaaaaacgaaaaacaggtggagatgaaaagacatgatgttatcataaagtgactgccgtttaggaaacacagacagcccctcttaaatgccctgtaaaccttaaactccttgttttttattacaacacgtgaaaataaatgtgttgtggttttcaccatctgagttgccattgacctataaacaatgccagaggacacggcgaggccagtgcttctggatcacaccgacaccagcatgtccctccccagcaaacgatcctgctgtcccctgccaacctctcatgtatcatcagagcccaattgcaatcagctcagtattgaaaggcttctggatatgactctggaaatgttttgatcaaatctctcaacttccttgccgtccttaacactctttccactcaggtcaaccagaaaatggatggtgctcctgacccatcaagcggttccacacttctcagccattgggcatgttattattacccttggaaggttagattattccttttgcattgggtggatgcctttgtattcctaaatctgcataaaacactttgttctttgagcggctcggctgtagccactccaagccagaacaaccgtgaccttgttctacttcagtactttgctctcactccaatcagcggctgcctcatgtactgctctaattacttacttctggttcagcaggcacgctcacccacttccactgttgcctgcacccatcctgtctgtgtctacaacaacacaacgagagcttggacttcctctagaagaattctcttcttccccatgctagtttccctttgtttctagaggcctgctacccctcatttctagaattaccttttggagaataatgtggctatggactgaaattacttgaaatagaacttacttcatagcatccaaatttacatacagtacaaggccttttttatctatttatcttgaaaatattcagtaagtcacactttccagttgcaaataaaactcatcttttataaccaggccatgatgtgaaaattacatgtaaatatgatcagaatttcaatgtagattggtaattctacagagtcatcttggaaataatctcattatatgtaacatttaaagtttctccatattgaagcaattaatcgttgcttaaccataatgcattatatttttgcagctctgtattacacacagaatatttttgaacatagcatttcatataattttttgaagtaagtttgtaaaagagacattacaatattttcttatataagtgaaaactggggtttgcacagattaagcataatgctcaagttacataccagtgattggcttagcctgatggctttatactgaggtctttgaatccgttattctgtcactgattttaaggatgctaaataatgcttttctttttggtgtggtggattaatgtcatcagaatcatcctgagcttattaaaaccacatttatttcatcacgtccaaaagactctagtgaaagagttgaaatgaagacataggcttctacttcaaaactataccataaccaccaaagattagtcacaagctttgttacagtacctgtttccatacttaaacatttatatgctacatatgcattcttaggaactcactgcctctattgacccaaaaacatgacaacattgctccctatgaatcaggctcatatcctaaaaggcaacagaataaactttgccccaagaaaaagataaaatgaaagacaaggttatgacaaaaaacaaagacaaaaagcttatgagattgaagcctggcatctgcctgagggatgatggatcactgttagtaaaccatatcactgtgagaatgccagcccacacctgtgatgggggaaggtgctctgtgttcagagaagctgtgccactaaccttgtcagtgcaaagccatactttaagtgctcagctctttatggtagctcattttttttgccattctgattttgttaggaggtattgcctcccatccctttcctgccattgtgctgagtcataaaattagagcatttcacgttcggtagaaatgtggctggaatttatgtgacaagccatgtccggtgcagaggccaattttaatttcgtttaactcttttgttctggagggatgaagatgctgagaaaagcgcaaagtgagaatagataaataaccacagtccaatttttggagagttgtcctatcaggattgactcctggggaaatctcaatctctctctgcctgtctggtacaaattttattttatcacagttctaactaccttcaaatacttagcattcaattttaaagtaaaaaaaaaatttacaaaatagagtacaatttggccataggattttatttccaaagtcccaattttctttattcgtttaaaatattaaggaagagcctgatggaggtgtgacagaccaggattcttgagatatgaatcctggccgtgacttagtgataaccaggttcctaaccttggagagtggtatgctcttgggagaccttcaaggtcagctgcaggtcttgaggctgaggattctgggacacagagaccggcagcattgtttttagtccctcatcaatgtgtacaaagatggtagagaggctgttttgaaaggcagattattttaaaagtctttacacattcatggaattgttattctttttataaccaagcaatgaaaacattgcagagtgcaaggtttttggtctattcagcacaaagtacataagaagatttgaattaataaataatccccaaaagaattctcaccaggctccagccattctgaaaaaaatgtctccggctgagctattcaacacatatgtaaaactgtaattctgtttcagtgagaatccaagtgtcattaagacattgttatgattaaatgataacttggcatgttttattctgccttttagagaatttcaaagactggaacatggtgttccctaacccccttttgttaccaaatgacaaaccaaaatttaatattgccattctaatcaggatttataaaaaaaaaaacccaagatttataagatgtttttcccctcaaatcgaacaatgaagaataattgaactggaggaaaaggcaaccccatctgtgtcattggaagcaacacacaagcatacaagcccagcaatgtcaatgtaatattgttcctatcatcctttgggaaatggaaaaggtttagatattcagttaatgcagcataagcatatctatcttgatctgctagtcatcactctctgtcaaattgcttagttgttaggtagaaaaataaaaccattcacagagactcagcctttggtgaagtgacgtgacggtttttcatgttgttgaaggttaccaagcctacctccaaaacactgttaacaccatcttccctaaacacaagcagccagcatctgcaccctactgattatgtgtgtctttatttgctaatagaaaacctctctggaagattttagatccaggggtagattctaatctctatatttagccttctccactacattttacatttgatgcacaaggaaatgaatatgaattcaaatgcataaagaatcttagaagctagcacaaaaaaatacaggtgtaggctaatatgcaggtgctagcttataatgtttatgtgtggatatgtaagtgagtgtatgacattagagaggagaccacaagggggggaaagaggaggtaagaagggtgaggacaaataaagcatatggaagcagaaaagaggtcatggggagtgtggaaggatgaaaggggaggtaagaggggttgggaggagagagagagagagagagagagagagagagagagagagagagagagagagagagagagagagagagagagattactaaaaccaaattttgtttgaaaacgctacaatgacactcatatgtatgaaaatttaaaaatttgaagagacaatataaacagaggctcagctgagaagttataattatactaatatgagttattaaagccagtgctacctggatcttggtcttgattcagtgactagagaatttgaaaataggcaatcagtgctggatcacttgtatcttttaaaattgtattgtttaatttattcattttttatgtgtatggatgttttgcctgcatgtatgtgtgtgaaccctgtggacatctggcacccacagaggccagaagagtgtgtctgatatcctgaaactggacagatggttgtgagccagcatgtggatttctagaaccaaacaaatccaggtcttctgctgaaacagtagaactaagtcatctctccaactccaattcacttacacacacacacacacacacacacacacacacacacacacacacacactgactatcaactgtacaatttggggcccctatgagctctgcttagttgattctgtgggccttaagggtgtgtgccactggttgaggactccaggagaaagaacatggcccacagacatcaattaagtagagcttacaggggctcaaagagactgaagcagcaattatggagtctgcatgggtctgagttcagtcttctgcatacatgttatggttcttagcttggtgtttttgtggaacttcctactgtgggagtgggggtgtctctgactcccctaccttcctcaatttatcataaataaatagttttatagagcaccataacaagatcatgcagttggcttttgggcaatgttaaattgctatggttgtttccaaatatttattctcaatctctgtgctctgatcattcaccattgacttaagggacagcatctgatcatggaccacgaatctgtgtgtggtagactgtctgactctagccacatccacactattggggaactttcaagaaatgtggatgcttacacctcacagacctctaaatagtgctaagttaaatcacttccctggcaaccacatcacattaaatacagagttctgggggaaaacaggggcagtaaagaccattcaataccagcagcaataatgaatagtttcattgctcctgaataggctattcagtggtctaattattgtcaagtcttactaacttgagccttctcacaaacccgagaatcaagtgtttatattttatactcactttgtaggtatgggcagaagaaacgaagggctcagtgtcattcagccagatagtggagtgcttggacatagaacattttatgagacacagatggctatgaggggccctcagatcaggggagtcagtgttggttggaaggtacatttgagcttgcctggcccatgggtggtgtgccctggcagtacaagatggttacattttgagaacttttatttgcatttcattaataatgtattcttccttaattccataactaaagggacataactttacctgttctttaagttatttttttatttctttctcttttttaaatttaaattctttaattactactcatatttacatatccatccccccattcctcctgccctcccatcctcccatgttccccaccaaccccaagatcatatcatttgggggagggcctacaccctccttgctgtattgggctgcaatagtatcccttcatagggaatgggctcccaaagtccatttgtgttctagggataaacactggctccattgttagaggtcccatagactgtcttggcctcctagctggcacccacattcagagggcttggttcagtccaatgctgtttccccagctttatgtctagggtctccatgctctcagtaggtcaggtcaactgtttctgtgggtttctttagcaacgtcttggctcctttgcttatccctccttaactaactgttcttaacctccataattttagagatatatttaaatttttctttctccttaagtcgacaatggaagatgtttgcctccaagtaccttcccctttcctttgtacactatgcattctcatctttatcatccagtcttcagctctaggctcaggacaatacctcccttttagctttttgtgtgtatgtatgttttcatgggtctttggctgtcctggaaccactagcctggtctcatatctgtagtaatcattctgcttcaacctcccaaatgcttggattacaggcatgatccagcatgccatgatgtctatttaccttttaattctctttccatattttaattgcctggcacctggtcaaacctcagtaacattttttttaaaaaaataatgaataacatttcgtatatctagaaaataaaatcattcaactgtggacggagtattctgtaaaatgctcattaatggaacaatttatttttatatttacctaacatattctgtacaaatagacctgtcaggtcttaaaatgccaggcaaaatgtaactgtcaatcttaaagtattgccactatgttgaaaagtgattacaacgaatcacatgtgtgtgcatgctgtgtgcacacattaatgatttattttctgttggtatttggcagacatttgacaagctttgtgattttcaattctacaatataggtaacatgctagaaatgatggaaaaagagaaattacatttatatatattatatataatgtatatatcatttttccttttttggcattataaattggttagttcacttgaagaataatgggtccttgtgctcacatgcacataccccccacacaaacataattaaaataaaataggtctttaaattttttaaaaaagaataatgcggtcatgcaatcattactgaatgtcttcaaatgaatatcaagagacatagatgtctatgaggggcctaagaagaaattggtcttcagaatgctgggattaacaaatgctatctgggagagtatagaattcttttcttaatgtctatcagggttcttattccaagctggccacttgataatcagctcaattgcccattggttatgtttccttacagttgaatcacattatatgtttcacttgttcccattgtttgtttgtatgtctaggtgtattgcatgcatgtgtggctggtgaacttgtgtgtaggcgtggaggtggtgcatatgcatctatgcacatatgaggccagagtttgataggtgtttcgatcaccctgcaccttattagttgaatctggagatgtgactaaattgtctggctagtaaaccctctagaattctgtctttgctttccaagaactggaatttcaggcatgtgcatgccatattggatctttactgtgggtgctggggattgaaattgtgtcatcatgttggcatggtaagcatttgccaactgtgcccccttttccatttttcaagctatagtcaacacaggctagtatagattaccttaaaattaattttggtagtctaaaggttcatataatgaaggagaacagatttctatctcttaggtggatttcagatgatggtatttaaatcaaaacaccaacaatttttcccttttctctacactggcatccctttctggagaatggtgtatcaaaaattgctttgttttttataaatgaataaataataattgatggtctttgctagccttattcaaatagaaatttctgcatactccatattaaaaaggccatgtcaacagaattctaaataagtagacttttgctgatattcacatattatttgggtatctatacatggtatggataggtttacatgattaattcactccacaagtttgaggatgcagtcctgaaatgtttatttcagttggatgtcaggactcatccttcatggccttatgtgcacacatcctaccattctctgtatatttctgttactcatcagacctgactgatgaagcccccgtggaaccatcactgtgagtctagcttttgtgtcagagaatacaaataacctggagaaaatgcactgaagcccagtgcttcctaattagtgacactgacctcccaatcctgcctcatctgcattatctggaaatgacactgtggtgaagtagtgacctcacccatgctcccagctatgaatgatgacaacttttttcttttattaccaggttctcctttgtaaataggagagtatagtctccattttgttacctctctagggactgtggttgaaactgatcaacactgtgacaacctgaacaacttgagtgtcatatgaggacttgttaatacaggtgtgccggcttgtggaaagactgacacattctttcatgtgttgtcttcataattataggtggctggatttatcagctttaattacattcttgcttgacttacaccaaaatgttaatttcttttggattaaataaactccatatgaattaatttgaccttcctccttcttaaaaaaaactattaggaatttcattagatttaagtaacatggaatttgatcacacagcattctggggctcagccacagcaggcttgggtactaggcaggctgattacaactcaagcattgtttcaatgtgattttgcaaaggatttcatttactgcagattagtacatttattaagctgttgataattgaagcctcttaggtttggtaagtaccatccagtgaggtagattagtggggtttaatttgttgctctcaaatcatacatgaagacttagaataattacatctccactgtggtctaataaagatgacattgcaatggcacttctggccccttctgaatgtgtgtgtttcctttaagattctgcattggcgggggattcacctttctccctcaagagaagcccaaaccttatcacccataaatgataagatctagggataaactgaagatatagtcatttatagtgtgagttacaagtatcagaagtcagaatgaaaagtactacaatagaactaataacaaataagtaaatatttgttattgtttcttctatatttatttgctttttagtatatgtcattcattataattgtttcatgcatcacgtttgtatgggaatgaatctgaagcccaaacacctcagcctaacataattcttttacaggataacattctaaaacatttatatttatatgcaggtgatcattaaggtcctaaatccaacatatatattcatggtacacactacactttcccctcaaaaggggactattgcttatgaaacactatctctatccacttaaagtctttctcaaatacatatcatgtcttgaatgcctgctgtttgggtaggctggaaatggaacacctaatgttcatagtagtctgtgcttagaagtaaaattgccatcaaaagtgaggtatgcaggtgaatgcaccagaaaagggagacggtttatactctctctgtccatggcctatgcaggtaccttatacttttacaacttagaaacttcaagttaacctcactcttgtgccccgccccacttcatcctgctgatcgtaaagtcaatctggaacaactgctaagagttttccatgaaatattctaccaagtgactttataaggatgcttgactacagatcatgacaacaattccaagtaatttcacaatatcatgaaagacaatgaaggtttgcttcttcattttcataagtgggtgctatttcaatcctgggttcatttcctgagaaagtatctcatgcacatttgtccaatgcaacaataataatgatagcaatagatgattagatacataaaacaacaatggtggaatgtatctcaaaattacatacacttagggcattaaagccaggagttgtagataaatatcaaaacctgtgtactttctgcagattatagtcaatgcttctctatacttgtgataattttcagtgtggtgatatattatcattcaccacaatgtcatgactgaatagacaattattcagtttgatgaagaagaataaggagcaggaggaggaggaggaggaagaagaggaggaggaggaggaggaggaggaggaggagaagaagaagaagaagaagaagaagaagaagaagaagaagaagaagaagaagaagaagaagaagaagaagaaatccccaatctaaccagtaacttggaattattcagtacccctagagacaagatgactgctatttggatggactggaaatggagtactttaagttcatattagtctgtattacatttttttcaagtctcaccttgaaaacataaagaaaatgagccagggagcatgaggcaaagaaatcatgagatgagaaagttccaaatggaaagggatatgtatgcattagcagagatgaggtaaggtgtgcagttagcagactgccccacagacatatgaagttacaagtatgagagagagagagagagagagagagagagagagagagagagagagagagagaaacttaggtggcctttgagagacagatacaggaaggtgaaaaatccggcccccagactctactcagtttctgggtgccagtgagatgataaactgtctccagtagtgacctgagtactttcatcaatacatttaggaaaagatagtgaacatctatgagttaaaagagacctaagaatatttattcatagttcataggtctagatcataggagagcatctcagttgacccatttgactttgatagtggaagaaagtgacatccagggaagggatttgactcattcaaggtcatagtgctagcacctcataaagccaatgcttggaggcctgtatctttcaacattgaagacgatgtcctccagttatatgacacccactctttgatgtggaaaacaggctaagctgtctcctaagacagcactctcatttctagaaagagactgaatgtgttgggaatgtagagagcacccatctgttcaaaggtgtgctaagggtagcattttatgaagtatttggctcttaggaatgacttcagttttagctgtgagtatccttgggtcttggatattctaacacttcttttaatgtgattcatctaaggggatttgacttccagtacttgtgtagttgttatctaggctgactttaagaacatatcatagacatctcaagtcacatgggagcatttaatttcagagatttatccccaaccttcatcctttgtcatctataatgaaggactttctgggaatttgtctgtgttagagttgtttatacctcttgctattcagtgtctaaatacagacgcctaatttgcttttttgcaaaagcaacccattctgcatattatttctgtattatgagccactgttccctttgatttgattctcactcagaaggagctctgtgacccactggtatttctctttggtgaaagagtggacaatactccatcagcttgcaaagcaaatgccagattactccctgagattcagtgatctggtgaaagcatgcagaactgaattaaccattcatctgagaatgtgctggccttgcatggggcagggtgtgtgtgtgtgtgtgtgtacaaatattggataaagtatgcctgtagcatatggccaacttgctcctcactataaggaaagacaaggaattctaagtactgtcccagtttccaggtcagaaggaggtaaaacctttttgattttcccacaagccttcgagagtttgtttgtattcttgcttcacagagcaggaggacatgtatatttatactttaagtgattaaaacttcataacagccacaccacacttttgataattattaacattctactatattagaaaatcgatgtggaatcaacttatagcagaaaaccataccaaaatcatctcaggagtttgtgacaaatacttctgctcatagtctctgagtctatagatgagggtatctccatggttttaacatttccccagcttcactgtaaatatattactttcttacaatatatccttactatagtttcccttcccgctactcctctcagttcctcctcttttcccctgctaagcagatccatttcttttctggtcctcacaggcttctaagggataacaataaaatgaaataagatgaaaacaaaactaacacatcagagttggacaagacaaacagaaggaagacagcccaagagaaggcacaaaaataagagacccacttttttgcatagtcaggggttccatacaaacattaaactggaagccttaatatgtacacagatgacctggcgccaaccactggagcacttgtgctgcctcagtctctgtgagttctatgagttttgatcatgttaatttagagggccttgttctcctcctggtctcctccatcccctctggccctcatactcctgcttcctcttccatggggttcccttagcactgatgaggtgtgggagggaggatttgatgaagacatcgcatttaggactgagtgttccaaggtctcactctctgcatagtgtctggctgtgggtttctgtgtttattcccatcggcctcaggaggaagcttctctgatgatgactgagcaaggcactgatctatgattatagcagaatgtcattaggagtcattttattgctactttaaaaaagaacaataatattgggtttaacttctaaagaaggatgacaggtaattccataaatgcattgagcagaacttttccttcctcttcagcatttctccaagtaggcctgcttgcaaactagattactgctgtttgctgaagccattttgatgtttttttctggttcttctcatcacacattggctcctgagctacagtttctacgatgtgtctttgccctctgtgtgcagcttcattcagccctccatagtactatgagaatgacattcttagaccaccgttcttcagttttagcatggctctcatagtactactgactattgtgtgtggttgtctgtgcttgtagaatgtttagtggcatttatattccttgtgagaacaactaaaattgtgtcctgctggagtaccctgcaattaaagttacagtacaccaagttcagacatctttctgagcttggggcaaaatggaggactcccttcctatatggatagcacctctaggcccagaggcctgaccttatctggaagctatcccctaagcctggatgcctgacctatctcaagcatgacctttgacacagatcccttcagatgctcttcctgtgttgctcatataataactaggttttgataggaccatactgccaaacacaaattaggtgatgccttagctgctgttcccatcctatatatatttccccttgctctgaaataaaactgagctgtaacactgaagaagtctcccggaaggctatttccactcatgctcacagccatctgaaccctatttccctttctgctccatcctcccttgcctacaggtggccaatggtccctgaggcggaaggagacccacagtttccagtcattactgaatatctcttggggggaggttgttctaaaatgaaaaataccaggagtgagtgggttaacccattctttgattgtctaaacaactttacaaaggtatcccagcaccaatgtcattgatttccaaggccacactcccaagcttgtctcctggtaagcttctctctgattcttacttttcattaaacaaaggcatccacttgctgtgttcacacttgtgcaccccttcttccacttgtcatcaggtctgagctgacccctccccatgcatattttttcaggatcatttgacttctgtaaagtttagctcaaaatccattttttccaaaatgttcctggattcttttctaattgtctttatccctcctgtttataatatacattaacttttgcatctatctggaaattcttcattcagtttctctcttcctggatatccaagtctgcaccccaagtctctggcacttaacaaagagctgacacaaactgcccttaagagtagcagcataatgttggttccccagtgtaatttgtgtattggtaagacacagcttgtgagacagagtcagaatatcccttacctttgtcttaatgcaaatgcctctgtatttgtagtagtatagttatgacattagtataattgtatcaataacataaataatggtattatattaatttatgtaataatggcataaataaacaaaatacatcttgggaaaaaaaagagtatcagcatagatgatctaagagtaaacatgagtgatcctaaaagttccactggaaaattcctacagctgataaacacttttagcaaagtggatagataaaaaattaagtcctaagacctcttatatacaaatgacaaacagactgagacagaaatcatggaaacaacacattacacaataacttcaaataatataaaatatcttcgggtaactctaaataagcaaatgaaagacttctatgattaaaaactctaagacactgaagaaaaaaatgaaaatagcagaagatggaaagatctcccaagctaatgatttggtaggattaatattgtaaaaatggcaacctaccaaaagcaatctacagactcaatgcaatctccatcatcattcaatacaattcttcatagatcttaaaaggacaatttacagattcttatggaaacaaataaaacaccaaaaatagctaataaaatcatgaataatgaaagaactgcaggagctatcactacccttgatttcaagtgtattacagaactatagtaacaaaaacagcatggcattagcacaaaaacagacatgttgatcaatggaacctgactgaagaccaaaggaaagaaagagaagacacgagttaataaaatgaatataagaaggaaacattagaaaacagtgaaattcagaaagtcacaaagactttaaaacccatattccacttaattggaaaatctaaaagacatggatgaatttctaggtgcatattacttaccaaatttaaaataagatgaaataaataaacacatctacaattagcaattggattgaagcagtaattaaaaaagtatcccaaattcaaaatagcacagaattgggtagattcactgcagagttctatcagaacttcaaagcagaactaacaacaatactacacaaattattccataaactagataaagaatttagtgctagagcaataatataagaaaattttttgaaccagtgttctcaacctgtgggtctttacccctttgtgtgtgtgtgtgtgggggaggaggcagtcaaataatcctttcacagggatcacctaaaactatcagaaaacacagatatttacattgtgattaataacagtagcaaaattacagttatgaagtagaaatgaaaataaatttatgattggggatcactacatgacattgaaggcttaagaaggttgagaactactgttctaaacattttttatagccagcattaccacagaaacacaaaaacaacaaaagaaaattatagactgatctcctgaatgaatgtagatgcaaattcttaataaactaataacaaacaaaattcaagatcacatcaatcattcatcataaccaagctggctttattccaaagatgtacagatagttcaaatacatgaatcaataaatgttgtaatttaaataaatggactcaaatacaacaattgcatgctcaatgctcatctaagaaaaagaaacttttgacaaaatgcaacatacattcatgatattaaaaatacccccctttgcaaatgatactattttacatacaagactcaatgaaaacctttcagagctgataagtatgatctacaagaggaagggtataaagttaacacatgaaaatagtagttctcctatatgcttatgacaaacacaccaaaaataaattaggaaatcaatcccattcacaatagatagaaattctcaaatatttaggaatatatttaataaaggaaacaaaaaactctatgaatattttaagatacctgaaaaagaaaatgaataagacaccagaagactgagagacattcaatactcatggatcagaagaatcaatattgtaaagctggctactctaccaaaaaacaattttctgtcaatacaatcccaatcacaactccagctccattctttatagacacagaaaatacaatcataattcatatagaggcattaaagacaaaggatagacaaagcaatcctgaaatacataaagcaggaggcatcatcacagctgaattcaggctattctacagagcagtagttggttccataaaaccatattgtaccaacaaaagaaccaacacagagatcagtagactagaatagaggatctagatagaagtccatgcaactttttgacaaagatgccaaaaatacaaattgaaaaaagacatgaatttaataattacactaggaaatagtgtatcaacattcagaagaatggaacctcatcattatatctcactttgcataaaattcaacttcaaatggataaaggatagccacttaagacctgatactataaaactacagagagaaaagggagaagcctcaagatatagacacaaatagggacattctaagtaggaaagcatagggaataagacaaaaaaaatcaaaacatggactctcataaaattgaaaacctctgtccagtaaaagaaactattaatcaagtgaagaggcagtccacagaatgggagaaagtctttgccatctatacatctgacaggggactagtgtctttgaatgtacaagttattcaaaaataaaacaccaagaaaacaacgtactcagtcaaaaattggactagaaaactaaagggcttgcaaaagaagaaatagaaatggctagcagacattttaaaagtgtcttaacttccttaactgctagagaaatacattttaaaactactttacaattttatttcaatcagaatggccaaatgtagggagtgggagaagctttaagtgaatgaatttctgagtgaatatgtatcattgacatgggcacaccatgaggaccaaggactcagacccatgggaaattagtgaagtttttttcccagatggcataggctggagattagcaatgtcttctcctcggccaagtaaaagttttgatggatgactgatcagtgtgtacaaaagactagcaaagacatcttcctcctctggaatgtttacagactgagatttctggcttatgggagccatcctattaagactcctaatcccttcccctgtgttatacataataaacatgctaggattccaggttgtttacagcaggtagtgtcactccatcagcataggcacagccttaggttttgcatatgggtgtctgtccgtcatttcttctttccctccccacttctagtcaaggttgcaggactaagccatgtaggtaggtacagccatgatcaggaaaacaaatgacaaaacattctgatgtggacataaataatgggaccccttatttttttttactatttctttattttttatgttaataaataaattcccccttccctttctcatgctccttcttgctctctttcaaattcatgccctcttttttcataagttgttaatttacacacacacacacacacacacacacacacacacacacacacacacacaccccaaaacatataaatacaacttgctcattctgtacaatgttacttgtatgtatgttttcagggctgactatttggtattggataacccatttaggtatgctctgggggaacccttcttatccactgttagtgggagtataaattggtacagccaatttggaaatcagtatggagttttctcaaagagctagaaataaaactaccatgttagactacttctgagcatgcacctaaagaattctatattttacactacagagatacctgcaggaccagatctattgctgttttactgaaaatatctaggaagtgaagcagcctagatgttcattaactgatgaaaatatggtacatatacagaacagaattttattgatctataaagaaaaatgaaattatgaaatctgcaggtaaaaggatgaaaccaaaaataattatgctgagtgagacattatggatctcttatgttctagtttcaacttatagttctgtataacatggaatagctgcagaagaaattaaactagaagaaagacaagggggaagtgtttagcccttaaagattggggaggggatagcagaactaggtaaaacaaagtaaaaaggaggacactggggatggaaaggtttaaacaaagagggaaatggagtattggggaaatggtttgtggggccagattaaccaaaacaaaaaagggtctatgaaaaagacatacagaaaccttctatcctacaacccacacaagagattgaagggagttaacttgaactgctagatgacatgactccaagaagcaattgattgctaataaaatccacatcttaagcatggtggtcttcaggaggtggtaaaatggccccagagtcccacaaaacaatgctggcttatgtcaatactcagaactaccagataagactctattactggggatgagagatggctccgtggttaagcgtgcatactactcttgtagtggatcctagttcatttctcaccacccttgcctgacagcttgcgatcagttgttactccagctgcaggggatcttagttcttctggtcctatggacacctgttcatgttgcacaaccccccacacagatgcatatgcatacacataactttaaaaaatgcttaaaataccctatggctgaagaaaccacactctgcagttgcaaggtatggataaagcaaggtagaaaggaactgtaaatgtccttcttgctgtctagatttcaaagtgtcagaagatgatatatacgcggttgggggacaaagagcattgatggccttactcagcagtgagtccaacctgctgggcaagatgtgcccatcaatgtaattgtagtgcgactcttgtggaagaaagcccacactcactgcatctgaggcctgctctaaggaagaaaacccatgtgtgatactgtaagcccagttaacaacccaagaataagaaggccacagaaccaaaatattgaactgctggccatttcctaactaaattgatatagcatcatacttctttccaaatatctatatttatagttacagggaaaaatcctaccatcatttcaagtaaagggggctttttgcaacaaattgtggtgaattcagatgctcgtggatgtctcagaatttaaaaataagtggtgattgagagctcagttccaaatcagacatttactctgcccttcctaaggttttctaaggagaatctctggaggggggatagaggtatgtaaaagcacacacacacacacacacacacacagagagagagagagagagagagagagagagagagagagagagagaggagacagcacatatacatactctttttcccatccaagtactaaccaggcctgaccctgcttggtttccaagatcagaagacattgggtgtgttcagggtggtatagccatagaccacatactctttacattgtgtgtgtttgtgtatgtatgtgtgagggggggaggagggagggaaggggctttttaattttttccaaaagcaaaaatagtaaacagaaatgagaatgagtgatgacatcaaagtggatgcccacttcactctctagcatcgtatctatctactctggatgccagtcaggctctgtggtcatctgtgcaggtttatcagatcagcttatagagggtaaggcagtagtcctgctgagatttggttcagggtccattcttctgttttaaatattaaatggagaaggtaacaaggaagtcatctggggtatgctttagtttgagttcaattgctttgataaagaccatgactacaaacaacagcttccagtcagtccatcatgaggggaagtcagggtaggaacctagaagcaggaactgattcagagaccattgaggaatgctgctaactggcttcctcttcatggattgtttggtttgctttcttatatgcctcaggaccacctgtccaggaatgacaccatccacagtgggctgaacactcccatgtcaatcattaatcaagaatgcactgtagacttgctgtcaggccattctgatggaggtgtgttctcaattgagctttcttctcacatgactctagcttgtggcaagttgacacaaaattaactaccatagggtgtgaggtgggatttttgagtacaaataaaattagtttgtagtgagatgtgttcctcctttcccttaatgatttccattgatggcagaggaaattgccccaggacagaaattcttctattcattaaaaatacatacctccattttgcttttgaatgacaatgtgtctttactttcttagcttctcatcagatatcagggtttcacaactgctctgatactaggtttctctgagacaaaggcagccattgagtccccctgaacaccatcttgtgtgtggaattaaaaacaataaaatcaaataccccaaagcacttcaatacctctaaaacattaaaataactgtatttaatatttgtgcttattatgggttgaatagtttctctaaattcacacctgagtgcccttggcctatgactaaattatgattatatatgcaaaagggcatatgcacatagacataattagttacaaagaagtcagtgggggaagattcagtagaaaatgactactgcttttatccagagacatgtggacagagacaggggatgggccataagaggaagacaaaaaacacactggcagtagtatgtgagcaagccttccgttagagttcttaggaaagatgcccaacaacacctagattttggccttctatgaggcaacatattttagtcacacacacacacacacacacacacacagtccaaaaacaaggctgctttctccttcaatttcagagcttattagaaagtacaggtgatgaaaaatcgaataggtaagattttatgctctgttgctgctgctgctgtaatgttttctattaaattgctatagaagcagctccttgctggcagtcatctatgtgttttgtattagtgtagttaggattctttttatctatgcttagttgtggagaattagtctgtccatattaaccttgtgttttctaaggaccagggtatctgtcgctaacaacatttacttttaaacatcaagtatcaacaacaaccatctttagctccagaaaatggtttactctgtttcaattatttatgtacacatgtgctctcctatttctgaagacttcaatttgggccaaggaagagataaaatccataaagtgcctcatctctctcccataacagtctatcataggatggaaaaataacgtcaatagttatgtaacttcagtatgacaagtgtgaacactctaattggtcaactggaccagaatgatgaggtgctttttttccccaaaccaatgtcactgctaatctattacaacagtaatgaagagccaagcaggccagttcccacggatatcttcaaagctctatagactgctacttcaaccattctttaattgcatctggcatagattgtagcatgctccatagaactaaggaggcatattaactggatttggctatccctaggtcactgtaagcatgtagctgccactgactgtggaggattgccttcagcatttgctgtgtcccaccatagccactcatcaaacactaggtagctggaaatgtgaatttttatgaactatattcactgtttcttgtttgattaccaggtgctaggtgtatactttgccctcatttttaggtgtatgtgttttattcataaaatttcttagataacaaagtaaaattggaaattatctattacttgccatctcagatttttatcagcaatgtttatattttatctattagagatttaactgatgggttttctgttattgaaaggtacatgtcttgctttcaatgtttacatatcaccttacttccattgttaatatactctgaattccatttctttttcacattttagtggtggcagtatagagagacctgtttcacatcctctttttttttagatttcttttaattctttaattactactcatatttacatatccatcctccctattccctcaccctcccatcctcccatattccccaccaaccccccaacccatcccccaactctccccagggatagtgaggccctccaccagggaccttcaaagtctgtcatatcatttgggggagggtctaggccttctttcacaacctcttcttgagccagtgaaaattcaatgttgctacttgtctacttgatctcagtagaggcactgatgactcctggacttgtgatgagaagggaaatggagtgtagtatccctcttgctaacctttgtctagtttaggtttgtaatcatgcccattctagaacaagaaggggtctgaggtctattagcacttccaatctaacgtagataattaaatgtttatggttttcctggttcctttcaaatattttttctaaatggacagtaacacagcaaaacccaacaaaaagatgtaagcctccagtacaagctcacaggagagaagtcctgaaagcatagaaggatgccagcaattttttggaagctttgtaatgaatggatggggtaagtggcatagttgactggagaatgtgtaaagctgaggtactgagctggaaagcattggctagtgataaataagctgaccccctaaactgaactcacaggcctagaacagaggcaccagatagtttgaaggctggggaattgatggagtcgaagaatgaaactcatttaggatgctctttaaaagaagcagccaaatttgcttctcggcctcaaaaagccagggaactgcctttcttgctcttctggagaagactataaatgtactcctttgagaagctgacacttatatcagatcccaaggcacaactgagagaaggcatggggcatgagaatgaagacaaactgtggataccatgaattacctggagatcctttaggatcttattctctctgggctattagaccacggccagtttggctaaattatcgcaccgtaaaagacctcttcacacggatattggatggtttactctggaaatattaagagagtgccaaacaatgacctaattatcttaaacttagggacctcctaacatattgcatattcatggaaaagaccacctggcactaaatactatgtgaggacaaaggattaacaatgtgcattttagtgtctcctcaggaaggagggaagctccttgtatgaatgacagaagtcagcaaaatcagcagtaaacagtgcaaagaacaggaatgacagtattgccaggaggctctgagggctggagatccaggcaagggggatgaaaggctgtgatgtcaaaggcatctccagaatgggagggaatgctaggaacttgagtgataggggcaagaaaagaggaaggaaggaaggactggagcaagggaggggcagagggaggaaaggagggacagaaggcgaaaagaagggaagccaacagaagtaccggatgacaagatcactagaaaatagaacaaggaaaaagtataaagcaaaaataaaaatattaaagaatcaatagtgaaggtttcagggtagaaagggagggaaagaatgaaaataatggtatttgggctcaggatatggtttggtgatatagtaagtaggtttgcctagcatacatgaggccctacatatgatccctagcacagaaaaaattgaagcaaaaaatgacttaaggaaaaacattctggaactgtagaacataaattatcaagttggagaagccactccatgaatgaagtggacctatgacaaagtataaaagggaaggatttccaaagtacaagacagaacagaatgtttcccaaggctctagatggggaaatggcttaataaacaagaccaagagcagtaatatctaagaggaaaagggatagcttgaaatcatgaggataagcaatattaagcaagtatgaaaataggacatatttcaaaaggtagcttcatagtcaactttccctagggagctactggaaaatgtgttccataaatgtggggaaggaagatgcctaaggaacagaggactaagcatggggcagaggggagaggatttacaagaatacagaaaagcaaagtgccagagagaagaggcagctcttgccagtcacccaacagctgttttacactggagcaaaggaccaagaggaacagggccagagattttcatagggatgtagaaagtgtgggagtatagtgaaaaaacaaaacaaaacaaaaaaacaaaaacaaaaaacaaaccacagcacaaaagaacagcaaaaagtctagcatacacataacctaaaatattatttgagaaaagaagtaatttaataatgtcacagttgaacttagcagtaaacgaaagtgagaaataaatgttcgaaggacacttttctaaatttatattgggagcaaggggagaggagagcctgctggagaagagaacattgctaaactccaccttttaccttaaaaatactggtcatgaaaaaccttttaaaaagtgggactctcaaaatgctatttagagagagttaaacaccacaaaaatgtggcaaaagagtcaaaggttgatgacaaaccaaaatatggagtgaggaagggcttaccagagactggttttgagtcaaagacctttgggtgccagttggctttcaaggctccataataaaactatttagcataacctcaggccattaggcatcttctcatttcctccttggcagttatataaaacgaatgcatacaatttactgtgagccactgggttagctatcacctcattcaatcctgatgagatctgtaggaggcaaagcaatttttgccttcacatcccacacagagaattcaggttcagagttctaagagattgcccaagaccataaagaaagagggacacagaagaagcaatatctgagacttttattcttaggatgaattgcccatactgtttctatacctctgtcttgaaattctgaaaggctacatgtggaaattaattatttatagcttatgaaatgtagttttgtagctacaagggtacttacagtatcaaaagtgggatgaattaataatatccatcaatctcaagtgaaagaaacctctattatggtcagaatgctatactatacctgtaaattggtaaaaaaaaatacacagaaatagggtaattatactagactgacacttcttgtcatttacttaatggggtcagattctagttctgaggtcatgtaggaagccaatatctggcagttgagtgttttctaggcaaaaatttaagctggctctggggacagacagtaggacttcacattctttaatcaaatctttaaaaaatgaccatagttcaacccatttcaattttggtttttgaaatatgttaggctttggagattaaaccaaaaatgttcaattaatactattgcttgcagatttgtgtttacccactgactcctaacccattaaaaattagaaaaagaaaaaacaaaacaaatagaaacaaaacaactgttaaatgaatgcagcctgcaagcctttataagaatctctcctatttcaggaggtcgagaccacttttaagaaactatttccacatgtggctagaagtttctaattaaagtggctattctgattctcaataaacactgggtccaagagctgaccattgttcaaagaagaagagaaattacttgaaggaagatgaatactataggcttcatttcctgggagatacttatcttcataaaagttgtctaggaaaggcatacaatttctatgtgaccaaacatgcacaggaataaaactgagaaaactcttattgtctttttaaagttgttaatatactacagcatggaatggtattatgtgaggctcggtttcctttcctttcctttcctttcctttcctttcctttcctttcctttcctttcctttccttccttcctccctccctccctctcccccccttgttccttctttccttttctctttttagaaattctggggaatgaacaagactatacatgatagggaagtacttcaccacttagctacacatccccagcctaagatgtgtaagtaaataggcacaaacactatgatctacaacagagtctgaagaaaaaaaaaaaaaaagctgacagcggtctgtttcctcaatggagggttctcttgaattgcattactaccattgcaactacacacaaacatttcttgagttagtaataatatatttgctcataaaattattcccataggttccccaattcaaaggattacataactaaccatgttggcgagttaacttggcgaacccctgtggacaatgccaggacctttggtcagagaactggcattgtcacaatgaaccttgtcagttcattcaaatactatgaactgaagttttctcatttatagaaatgcagtcctctctgctccacagggcttttgttaggtttaagaaaatgaagactatgaatgagagtggaggaattatttttataaatgaaaaatactgtagaaatctaaatcatgatgctattgagattaaaactagcataatctaaatataaaagtgttccagtggtaacccacaaatgggtggtatatcccatatatttttagtaacatcttgatgactttgtggtggaaagtacacattactggtcaggaatggtcatgccctatcttaccagaaacagaacattgtaactcgtggaaaatcgcatttctttggaagaaaaataccttctcccaaatcccacacgtgggcagattaaaggactaatagtaattaaagattgacactgagagaataagattaatattagagaaggattacatcaaaaaagatttacatcaaagggttctttctctttcctcctgtagaaagcctagcacattgaaagaggtcttatgcaaaacaccctaagcctctcagtactttcaaagaaactgaaaaatatgaagaggtaagcacaaatttattctactggaaaatgtcagaatttataacatgcttaaggttttaccccacagggaaaaaaaaaaaacacatgtattagagagtgaactgggttatgggtttccaggaatgagggaattctgtttggaatctgggactattatttgggatattggtggtggagaacagatagcagaaacaccataaaaaagtgccatgaaccatctaatcacattacaaagagctagtcagaactacctaaacacaggtcttctcaagtggcatgtccaaatgcagtgggtatgtctacaaagtgcatatatagaacatttcatgaacaaacaataaggaatatttccagtgtggccattcaactgcaagccaggagcagaatgaaggtgaggataccacaaaagtctcttcagggatacaaggtgaatggatccctgggtgggagaaactggagaacaccatatgggctgttctcatttgctgcagtcagcactgatatccataaaacagcttttatgaatgaaggtctgtgccttgagtacaaaggccaaagacattactatcattttttctttcattgatttattcagtaagtgacccttgaatgtcaagagtgtcagccaagtactagcctcatctcagcactcaggtgcttattactaagaaagccttgcacaaaaggatgaagtacaagggtatatgtacttcagaatgtgaaaaaaaacaaacaaacaaacaatagccaggtgatgatggcgcacacttttaatcccagcactcaggaggcagagacagatgaatctctgtgagttcgagaccagcctggtctacaaagagctagttccaggacagcctccaaagccacagagaaaccctgtctcaaaccctcccccccaaaaaaaacaataaaacaaaacaaaacaaaaagaatgaatccaaaacttttccagagttcagacctgtgtctgtctgttatgtaaattcatcatattattacaaacactgatatagcacttgggcatttgcctcaaaaatgtcagtagtattctgataatcctacttctcacaggctgctggagaactgtcttcaaggagcttccacccaatgttatacttattacaacagggtccaatgtgaactgggaccctgaggttaattcatgaacatgaatggaggacattttaagtagtcctacaacattacttagtgtggtgactgcactgggtgccccaaaggatgacatttgttcctcttctagccgcagtgagcatcaaatgagaacaaagagcactcttccaagtgtcaagagcaaactcaagtgtggcaattctgtatgccagcacgggcacagctgaaccacgaaggtgccaaaagttgcattctgtgttctttggagttgtttggtatacagacatttgtattttatattttagtttaacaaagctttaaaaatgcctgaagttttctgtaattggagaggactaactagatcaatcctgatagataaaactgcctgtgaaagatcttacattgccctgtgtacttaagatagaggcacactggtgcagctcctgttttagtcactagatggtgatgctatctggggagtgtctgtcaaggtgcaggctagctagagagagtcacttagtggaggcatgcctttgaaaggccacacctgcttcctcactctctgcttcctgtctgccatgaggcagaagcttcctatgccacacactcccactactgtgaagtcctgagtaggcaatcactaacaaaatcctctgagcctgtgagctaaaataaatcttactattcatgtttctcagagatttgggcacaaagatgctaaaactaacacaaacactgtaactagagttttaaaaatgaaacaagtttactgataacaatcatgggattccccaattttctttcatgtctgatgttgcaattaaaactctagtacaaggaaccaagcacagatgacttgtgacaatttctatatcctaagaagaacagattattgaacagcccctgtatttataggcaaatggaatttttgcataattaccagctgtcttagttagagtttatttatttatttttactgctgtgaagagacaccatggctatggcaacttttataaagaaaacatttaattgagggtaacttgctttcagtttcagaggttcagtccattgcgaacatgaaggggatcatagcagtgtacgggttgaggtagcattggctacattgtggccagaaggcagcaggaagttgactgatacactggatggtatcctgagtatatgaaacctcaaagcctgcccccacacagtcacttagaaaataagaatataggggctagaatacagttacatgggaggagtaagttctaatgttctacagaaaatgactattacatatattgtataatatatatgtagatagcttataatcaactagaagagttcagaagttcccatgcagagaaatgagaaatgtttaaagaaagggaaatgctaactacatctcagagatgtgtatgttcaataccaaataaaacaaaacaataatgtttagccacaacagatgttcacttccaattaagatactttagtatttattagtaagactctatcctatttattgtgttgcatttttcagttgaattaggcagaattctttctttgagaacctcaaacactcatgtaatatattttgattaaatctacccacctttctcacccaggagaaaacttactctccctcccaccagtagccatcaattgccaatggtttctgagttaagggtggaacttcaggaacctcttcccctttcatggtttttgcttgatcttgtgtgtgcaatagcctctgtaagtttatgcatgtaaaaacaatatcatgtccagcaaatagattttctctgcagacatccacaacttttggcccttataagtctttcatccatctcctatacaatgatccctgtccattaaggggagggagggtgatataaatcccatatctagagctacacactccacaagctcttattctctgcatatcagccagttgtgagtcttgtattaatcattgtctacaataaaataaaaattcttcttcttcttctttttttttccgagacagggtttctctgtgtagctttggagcctatcctggtactcgctctggagaccaggctggcctcgaactcacagagatccgtctgcctcagcctcccagtgctgggattaaaggcgtgcaccaccaaagcccggccaaaataaaaattcttcggttgggttgagagatgtactaatgtatggctatacagataagaacttagggttgtttaatattgtgtctaattatagtattagagtgttcactatataacctagccagtcatggcattttggcccagttaatggtaccatggatgaattctgtcttctggaacagcgtttagatttaatctgaaaatgtttagttactcacataaccttttaccactattgcatgaacatattttggccgggcatcattatcatagctcatagcattcatagctgggtaagattattaacaaataacagtaatgagtcttgtatgtatatatgccagatgtatgccttatgaaggggaatttctgcagtttataagtttttattgtcattgtagcataaagagctgcatactatcacaagacatccggacactgagcagagtatataagaaatctttttgataggggagaaaactgaagatcacaaaagataatatataagtagggggtagagatgaaccctcacttcctagaaatgccactgaaaactttgtttttaaattagactggacagtgttaaaatctaggctgaagatttgtagaaaaaaaagtttttccagaggacagttcttataaaaatgataagaagtctgttaaatatccccaactggtaaagggaaatgatttcatttaacagagagcagaaacacagtatgctaatggcttaaaagatgaaagaatcaatggtttctgaattaagccagaactgtaggagaaaattctctttactgatgtgtatcaactccctggccattacgggcatttgtagttgaggttcaaggagggccagatgggaaaattacaccagggctaaagttatctattaggtcacagatagccaagagtttaaggcaaaacaaaacacattcacttcttttcctgaatcttgctttgatctgaggttccctgcttgaataatatccctgacaagggctatcttctgaatgactccaggattagtctttgggaatttgcatacctaaattatcatccagcagcctacaaacctaaaagtacaagtattaaaaaacaaacaaaaaccgccatggttttctgctgtctctactagtttgaaaggcatctgaagataccccaaactggtaaaatgaggaactgagctgggctgtctaacttgaaccttgttgggaatgaagggttcaaatggcagccttgggggcaggggcttccccagctggcaaacatattacctatattagcttgaactgcagtggtaatgagaatataccacagtgagaggaatggaagccagggtcagagtttattatgtgttcagacaacctgacaattaccagagagaggaagaagcaagatagctagactgctggagctagaacctaaagtaacaggacaaaccaaaattcacagagggaaagagatatttctttttgtagagggacaaacccagcaccacactgactgtggtcttaaagatgatttgccatttctggaggaactctgtttattttattaagatacttttatttttgtttgttttattgtgggcaaaactgattatatcctctagctatatcccctatttcctaagatgatggggaatgttcttctgtatacatgtttctctaattggttaatgaataaaacactgattgaccatacaggaagtgacatagctaggcagaaacttgctactagctaaccatagaagtctggaggtctgtacagatagacaagaagtgatgtagctgggcaggatcaggatataagcagggacaaacaggaaattgctctcttctctgcagagacacttaacagtcatcatgtagacctcaaaggagtaagagatctggacccttctctggtaagttaaggcatgtgaaaatacttagattgatagaaatgggttaataattaagacagagctgaccaataagaagtcctcaacaatttcataattaatatagcttctgtgtgttcatttggggcaaggcagctgtggaaccaggtgggaaaataatcctgcaacactaagagtttttgcctaaccttcctatggtgttctgaaacatttttcattatttgcttactctccttctactgtgtcctttccccatcctcacatgagtgcagaacttagtcactccctaagctgcttacattagctcaggttcttgacttttcctctgctctgtatgtggcctcagctgtccctttggtctcttcttgtttcatatgatttgctcccttataagactcaactgaatcctggtgtcatctacaaagctttctcaaccttgtgcctcaggtctctgctccctgccttatgttccaaggatgctaagaccaccgagatgactttacctttggctgcctggtcctcctggaggcatgcactgtaacctatagcacccaaccaggaagtatcagtgcatcctttagcataaattgcattgcctggtgttatgagttcattcaatgaggccaacctttgcaaatacacctttctcacttttctcctggccagtgaccctgcacaccctgaaaggaaggcagaacttgtgattttgcccttaatcatgacaatggtctgacctaatccttggtgtctggctcatgggactgacagagaaacaaggccagtgagcaggaagatgaacttggccttaacctgcccagacactcagtgctttcaaaagggcagtattttccagctgggctgagacactatgaaatgtatgcctttgaggttctgaaaaggcttctaaaaccattttctataatttccccagtaggatacagagggtgacttttcgcatttgtcttcaacataaatcacaagttggcttgctttactactcccattccatgctagttatatattttcttgttccaggaggagccacacagccccaaatgaaagcagtgtgaaaaggagggaagaactagggtggaggcctggtatgtcaccaggagttaggtaaactgctaacaagactggtctactgggtgtgtttgtgacaataccaatcggagctaaacatgttgatctctgagctcccttggcacaggacactgtagattaatggctgtttttaagtgtttccaggaaaaatagtttaggctaatatgccacttttacaggtaattgctacaccatttaattaatacaggggacctaggcacttcctaggaagaatccccatgaagatggagggacagttattcaaatgcagtactaatatctagactctcatatctagcccaatggttagcctgtgtgagtaaacttattaagatataacattcaattttttttgtttgattttttttttcttttgagacagtagtctcattatatagccctggctggcctggacctcattatgtagaccaggctgacctcagattcagagatcagcctgccttttgtctcctaagtgcttgaattaaaggtgtgtgccaccaagtccagtcattatggtaagatcctattgccgaaggctctaaactctggtcagagaacaccgaaaaacaacttggtgctgtccaggaagcttcctcctcgcttactagctttcatagtaccaaaagattctatgtatgccccttggggagaatgtcatcagcagtttaacccagatgtaagccacatgagttacaaaaaatgactcgtgtgcccctaagtatcatggtggcatgagtactatggggtaactgacagctttctgattggatttaagacccactacatgggggaaaatacctgggaccataaatatggccaagaacccacatctggggagctagtagtaaatctgctactattattttactaaatgaataaagactcaaagtgtcatctaaatttgtatctcaatactcacagattaaatgcttctctatgactttgtcagagaagtttctttgtgcagtgtatggtgcacaaattggatatctataccttaacagctccccaggcctgggaactaaaatgctacaagacccagaggtcaggaagggctggagtgaatgagaaccattgcactcatcaactcacagcggctggggttgaccacacaatattaaagcagtaaacagtccagcatgagggggaaggagctgaggattcactagaccaacatccctagctgtggagctattgacagttgttggtttttagaggaagaagagccaggttcttaagagtatggcccctcataggctgaccaagctccagtgaatggccccacactatgagtacatagacagcaaaaaaaaaaaaaaaatgcacttggtgggttatttaaaaaagaagaaaccaggaagtcggatggagtcaagatgatctgggaggagttaggggtgagactagcaagtgattatgatcaaaacatactgtatggatgtataatactctcaaagaataaaaaatttatttttttaaagagaaaaactatagaatttgaaagatggtgtgtggagagcacacacagggaattttattttacatccagaaataaattcaatgagtacatttgaaagtaattatcagatacaagataagcatttaaaaataaagaaactagtttataaatggagacaaataaccaggttcttaataattattaaatttgaaaagttaaaatgttgggagctttaatatttggatggcacctgatggtgcaaacagagagaggaagtgctgcttgcttcaggttattaatttccaggttttaataactggctaatgacccagcggatgttgtgaagctgcagtttgagaggcaatagaacacatacctgcaagtgttctgtagtgtggacacagctggtgtttgtcactctcctacctctaggaaatgtcacatggtatgcttgctgcatgcctgagtcacacagaatgagttctgggcacggacattctttttcttcagtggctggggggaggggtcacccagaatgtgaaggtcaacactgaatagctcctctgcaacccacagcaatatgcatgtaattttcattcactgaggctgctgtttccaacgtgtctagctgatagagaggcaaactcaccacacagaaaccagtgagggagcgaggatggacaagatctgagacatttgaggtacagataagcataagctggcaagtcccagtgctggtccagcatggttggggtaaacattttcacctagcaatactccatattcagcagaacagtggttacagttgtcatcgctgcgttccaaatctgggagcccttgtgtcttctgtgtcagactctctatgtttagcaactgctgccactgaacaggaactgcttggagtgtgttactcggaaagaatgtattttcatctcggcaaggctaaaggagggatgtagggctcggactgtgtctaggaaatagatccattgtagttgcatgagtcaagctagtcatttggttagtcacctgtcacttatgatttgaataggaatcatgtcaactgtttttagtttttttcttgagatatgacaatgggcaaaacataggatatttgctttgagcatctattttgtcctgagtatgacaacaggagcccaggatccttgatgtgtaagtctcagcttctggtgtctagttcatcctgtgtgggtgtggatgaatgtgtgaatagcctgtaacttatctctatgatgttcaggaagaaaagaaggttgttgactggcttcttaataaacctcagatgctgctggaagctcacagcattgagccctatggccaaacattcatagcccctcctgtcccacatctccagctttcagcctagtaacgtgtctgtcactagtattcagaataccaatacaaggcactgtgtgtttttctggaaatgtagaagagaaggcaaagtggacaggggatgtaaagatgttatccacttagctggcaagagaaaaatcacagcagatccctttcccaggaaggaattcataaagcaaatccagtacaaaggaaagatgagccttgttggttgggagctcaccatcatttcctgtgttgaaacattaacattttcagacataatgggcctcttttttttctttcttttttttttttccaggccactaagcacagacaatgtgctcaggaactgctcgaagctggcccaacagcagggctttgcacttgaaacaaagatctggattttcctgcctgttcaaagagagcctggacatgaagacacagacagatgagtggcatgtttggttgtggggattagccgggttgtgtggaatgtcacgatggcacctgagcttgcactctgaacctcttcatgccactgccttaaaagaaatgtcctccttcctgttggaagcacttggggtacttattaaggcaaaagaacttccaggaaaagagaagggactgcagtaggaagcagcctatttctcaacaaggaactgacaggttgtctggccatgcacagaagcaacaacactttcaaatatctggaaacaggaacttgacaaatgaacttttgtcatctaaagtatgccacccctcatggggattgaaataaacgctgaatcttactcctctgtaggaccaggattctgacagggaggtcttttcttatgtgacaattctgacttctgtggtctcaaaccaacaaatgagttaaatgaaaccaggactttgctcttccctgacaacttaatgcttccttcccctgggctttccttcctgtgataatatttagaggaagattgttttgtgagccaccaactactccctgtcttacacatagggtcttagtgcagtaggcagggattttgaagtttccaccaatcacagaagagacacaggaggaatgaccgaagaaagtgtaccataaggtagttggtaagcttgtgagaggaggcaagctgagggactcagactgatccttcccccaacctggactagaaagagagggataaggtcaaaagtggagagggtcagcgactccagaggggttaaactggtatcacccatgtgctagattgcaggaaagtaactcaccatgagggtctctgaagctcggagaaggctccttcaagcctttgtagtaataatgagatggggattagatatcaacaaagtaaaaatggatggtgtcttaaaggagaaggtgaggacaatcgagatggctcactaggtaaaggcatttgttccaaaacccgagtttggtccctagaacccagatgctggtgagaaccgacttcctcagtaaccctctgactttcgaacacatgtgccttggcccacatgctcaggcacacacatgcacataaccacacaaacacaaaagagaaattgagctgcaaagtagagaaggcatgtaacctcaaggatgaataagaagttaagttataggataaagccaaatgtatgaaatgtagttacttcatttttacatgtgtacatgtccgtgtgtgtgtgtgtgtgtgtgtgtgtgtgtgtgtgtgtgtgtgtgtatggagacagaggccatcctcagaaaggccatccatatctcttgaggcatggtctctcatcagccaggagctcaccaattagcctagactagctggccaatgacccaagggatcatccagtccctgcctttccagcattagaattatacctgaacaccagatttctgggcatttcctataggttctggggatagaacaccagttcatgtttgcatggcaagcactttaccaactgagccatgcccaagccctatcatggacatttgagattctatttattacattataacctactagaaacagtgtggttctatttaaacaacacagttgatctttaactttcatagatttttgtctgtttgaatttgcctgcttgatatgatgtatctgtgacctcaaaatcagtactattgttgctttcctgggctttgtggacatgtgcagcatagcaaaaagttcccataatccctcaagtgttgctggtagaataggagggaggcaatgatcttcctgcctgattcatttgcatactctgaactctcatgctctgttgggcaccgagtttttcacattgtcatacttttcattggttatttcctgtggaatctgtcccaaccatagtactgaagtactatatagtgtccctcagtaacagataatctgtgccatgcattaggaaggaaggacattttagaaaagctttgttcagtcacaaattctggtgcagccagccccgaatgctgtgttaataagccagccatatgtgttaaataatgtgtctttgtcaagcatggtgggcacacctggaatcccagtactcaagaggctgcagaggagaatcgtgcacatgaggccagaaaggactgtacagtgagatcctgtcttcaaatccctccaaaaggaagtatgcaaatgaacctatatacactttttaaaaagtgttccttaaagagatgtgggtgtgactcagtaatgtgtatcagttgtgtgctgtgtgtgacaaacagttgtgaaaggtgcttagcagggactttcccagaacccagtcttacatcagactatgaaatataaatagaggagagggtgcctcgctaagcagcatggcatactagttggtttcagaccagtctggtgccaagaactagagaactgtatgtaaatgtttgatgatggtgagttgtaaagtcagaatgaacttgtgggtccaaaatagcacagaagagaacaaagctagccaagtggtactgagagaaactcaggaagacaagagcaaaagaagcttgaactagacacatggattggaagactgaatcctgggaaatttccatctctgcaaactgatctaagtcaatgtaattttactaaaagtgtctgggatgcaaagatctgacactgggccagtgcacacatggaaaagctgcaggtcattaagacaaataacacaggtctgcacaaataacagcaaacagacagaggcaatggaatacagaaacaagaagcagacccacacttgggcacataatccaagtagcacttcccagcagcaggaaaaggataaatggtgccatgtggcctgacctagtgcacatctagcccagtggttctcaacctgtggtcatgacaccttgtgggggaggtatatcagacatcctgcatatcagatatttgcattatgatttataacagtatcaaattacagttatgaagtagaaacaaaataattttatggctgatggtcaccacaacaagagattaaagggtagcagtattaggaaggttgaaaaccagatcttgtcatagacaaaacgacatcatccacatcacccagaaatatcaccaggtgggtgagactgtgaatggggaacaggaaatgagctctgtagaagacaacatatctttgaggcaagcaaagactacttaggtacatcacagtagcacaaactgaagaagacaaaccatggaatgtttaagatgtgtacatttcttcattggaaatgaagttatgggaattagaatggaagtcactagccaggtacccaggttccagataaaatgcagagccaccaaactcagaagagagaataccaaggagagggaggaagagtttgtatactttctctgcctcccatccctcattgttgaagttacctccttagaacattagttcttatgtttctagattgaaacagctggtctttgcagattgccattttgaaatttcttgggagatgagggaacacccacctgaccctccacaatgagggaggtttgggaatgtggaccagaactgctatacctccagtcacagcaggcatgagggagtcatactgaaaccatagcaggtatgatgactagccttggttatcaacttgactacatatggaattaactaaaacccaagcaactgggaactcctgggaaggattcttcttggttggattatttcaattggccccacctcaatctgggccacacctggtggcagcctatgtaaaaggccatgaaagaaggaagcatctggtcattgtctgcttccccttaatctcactggcaaattcaactattctgttcctgaaccattccttcactggtgttggaacctacttctctgggatcccaacatgaactatataaacagacagttttccagtattttcctggggactccagcaccagactgggactgcagagacatccagtcttgtgttctgaacaactaccagaaacatggcctttctgtcaggggacagatattgttggactatttgaaaaacagcctgtaatccactctaatcacaaacacacacacacacatagacacgcagaagttcattctatcagttttgttcctttagagaaccctgactaatatagcaggcatgaggggagccatgctgaagcccaatgttacagaagagaaaatttgtagaattagggtatctaattaaaatgtagccagagtctcaaaaaatttctgtgcaaacaatattcattttaatatatacataattattagtggtttattatatgtccaattacagaatataaatctagtttaagtagattagaaacacaaaccagaaaaaaagcccatggatttgaaagatgagaataggcattgataggcattagaaatatgagggaggaaagggaagggaggaaatgatgtaattatattgtaatctcaggaaaataaaatattataacagaaagacatgcaagtcatagacatctcttgtatcaatatgtatgaatctcacaaatgtattagccagatattagaaggaagttacaaaaccatatgacgacatattctcataaaatcttcaaaaacaaaacactgagtttggatctctagaacctaagttttgctttttttgtatctatctatctatctatctatctatctatctatctatctatctatctatttttaagccagatgtgctaatgtaggcttgtaatcctaaaaatggcaagatgggaggcagagattaggtacatgatccatggagaggtgaagactaggctagttgcaaaggagaaccatattcttaatcatttatgttctttcctgtttctcatgctttatagtttactgaaaataaaaatgaggaaaatatgagacaaacagaaacatatctctagaaggtgaatccttgggctactgtgttatagctttctgtttatgttctgactgtaaggacctcatgtgagcgcagttgctgctcaccacagggcacctccatgccattacatacagttactgtttctgccctctgacagccataggtgtttattagtctcactgtctgagcttgcagccattcccagtgctggtaatgtgtacctttcctgtctcatgtatatttgactttgttgtagtgtcattgtgcttgtcctgcctgatgttgaagtacccagtgacatggctggagaatgctgttctcatgagaaagtgccaggtgagcagtgctttacaaatattcatgggccagcatatttgagactcctagatcatataatccaaataatttcagaaggtcttctcagatgagggccaagaaaaagagatgtgataatggccattcccaagcctgtagagctttcaaattgtaggtctggtgttgtgcagaacacatgatggatggattttatttcatgactaacccttttctcccctgccctccatggctatttttggtctctttatcaagatcccattttaggaccatttaaaaaaatactagtgtttccccttaggcttcatgtggatggatgtttccttatgttactgttccttttcctggctaacagcatataaaattacacataaatttaacaaggcaagcccaacaatggccccttggctacatatgtcctaggataactatgaatgaggtggaacacatttgtagatgacagtgtcatgtcctgatgtcaaaaacacctctggaacttcagtgatacccacatgaactcatttcttccttctgtagtctatttccacatcttacatctggttccaactggaacctccaaaggcacctttaatttcaactgtccaaatgaactcatgagattctataaaaatcagtctatttttttgtctgttaatgatcatggctattgccagcccatcagattccctcagagacctagatgtccattctgccattcccattctccagctgaaggccacctagctctttggagtcttgtttgtagtgatgccctgcacctgtttccctttgtccttattgtcacagcatctgtttcagtgacccccttcacctttcccagctgtgcgaccacaccacccacataagaagcctgtcataggcaaagtggctgttcctatcattgtctccattggggttgatggtggaagacagttgtggccagggtaagtgagaatgaggaggaagaggagaaaatgaggaaaagcgaggaagactgaaaagggtacaattgattatttaaaaggattaatatcttctgttaagaaccatcatagtgaatttctgtgttcaaggcggccaataactctcagtattattttatccaaaggcatgaaggaaggatatcagctccaagttaaacttctcaagtgttaaaattataaaatacaatatttttgtaaaacacacattattctggggaaaatcattttgcaacttgttgaaaaagtcaacagctttcctaagatgttgtgaggacctgagggcttggatcaggtgggggaatctctggccacctgaagcaaggcagaacctcatagtccagcttctgaccagctgggagagtaaggagacagaataaactgggctggtgtattttacaggatacacatgaaaacatttttgggtagttaatcttaaaatctagactggtgtttacaaaacactgctcggtaaagaagtagcctatgggaagccaaagcaaaggtatacgctattcctgaaagagtttgtgagaggagcctgccacagaaagaaatgataggacagagagagctaaagacgctggtcaccagctcctctataggcatggggtatggtggtctacactgtggtccctaccactctcctgtctcccagctttcacgcagttattaaggcacatatgacatgtgatgaactgccctctcctgaaatgtataattggatgaggtgaacatacaaaggcatcaaatcatcactacacatgtatgtacttttctatcatcacctagatttcttatctgtaatcttcacttctagaccatctccaggctcatcaggtacccaacctagaggatcaccataaatatcaaattctgtgacttacaaatgagtgtggcttctgtgtacactttcctacagtagcattgccaatcccaattccaccccaaatgacagaaagtgatttttttttatttccaaatttggttaaaccacctttaataatattggattttgttttctaggatgctactcctccagcatcattcagcggtatggactaggaattccacctatgaacacagagaggccaatggttttatttgatttgccaagaagtaaattgctattatattcttacagccactgcaggtcaaaaacctgaccgcagtacagagtgacctgtccacactccactgcccagggttattggctccaaggcttcctgctttttgtatcaccactataagtaagggtggcctagagaggggcttggagcagaaaacaaaggtcaataggttcaccttcactttttaacacacaaacccaaaagcagtagagaatatcactgttgctaaaatcccaagacttctatagcgagacatgaatagttagaaaacagtgattcaaatgaatgactagttagtgttttcaagaactatctagtcacaaagaattttttcagttttttttttaatgcctggaactaccatcataaacatttcaagctgtgatacataagtgaatctgttggcttcttgtaaccttaaatataatttaccgagtatctgggttatatacaacaattcatagcaaccactctattaagtcttcaggtgtaaaacattaatttttgtatcaaagtcttaacaatataaaaactgtcaagctgtttcattattctctccctctatcctgcctccaacttgatcccttatgttttatctccacccatccccagcttacctaggggatatcttctatttccccttcccagggaaatccatgaatccctctttgagttcttcttgttacctagcctctctggagctgtggattgtagcatggttatcctttactttacagctaatatccacttatgagtgagtacataccttgtttgtcagaacatggtattgagggtctgggtaacctcacttatgatgaattttttcctagttccaccccatttgccttcaaattctggatgttataatttttatcagctgagtaatactccattgtgtaaatgtaccacattctatttatttgttatttggttgagggataagagtaatgaaaaatatgtcttgatggggaccatggagaggcattttggggtcaggtagaaacctggtgcaagggaaatacccccaaatctacaaagatgaccccagctaagactcatagcaagagtggataggtagcctgaactggccatctcctataatcagattggtgactaccctaattgtcatcagagattctttgtgcagtaactgatggaagcagatacagaacttcacagccaagcactgggcagagctctgggagggaatcctgttgaagacatgtaggaaggattatataagccaggggggtcaatgtcatcacaagggaacccacacagacaactaacatgggctgagaggagctcacagacactggaccaacagctaaagcgtctacatgggactggtgtaggccctctgcatatgtgtgacagttgtatagcttggtctacttgtgaaactcctagcagtgggagcaggtcctatccctgatgcattggcagggctttagggaacctgttcctcatactggattgctttaccaagcctcaatcaaggggaggaggtgtgttctaccttaatttgatatgccatgctttgttgacacccatgggaggcctacccttttctgaacagaaacagagaagtggattaggtggggcagaagggaggtgggagggaatatgaggagagaagggaggggaaaatgtcgttgggatgtaaaataaataaataaatttagtttttagaaagctaagctgcaggttcttgatttcttccaaatagtggtcacagatctcacccaaatgctgggtcaccagtatgtcctattgattatgggaatactggggaaaagaatagactgatgaagatgcaggtactgtaaattgctccctgccaccatactgagacagaacaaaccccttagtgatgcctgaaaaacaccacaatcttagctgctgtagacacaatgagaagttgacatgatgctaaggcagaacaggtgtgtgtgtgtgtgtgtgtgtgtgtgtgtgtgtgtgtgtgttcatgcacacatgtgtgaacaaaactcaggattacacaatagttacaggtaggtaaatgtagactttaaaatgtctataatggtttaaaatattttcttggcgcatttgttcattaggactttcagaaaaggaagcctcatggttatcctactttaaggattactggtcttgaagctagctatagtatttctactcaagacaggtgacttgctcttgctctgaaatcactacacaatggtgccaggactggttgtgcagggaccagctccccatttcggcagccataacagttgaacacgggcttgccctgaccttgccttagtcactaggaggtcagatgcctgcctcgtggcaaggaaccaatcagaagttatctggtggtgctatactttatggctctgggtgtgttttacggacaagtgcacagcaatgactcgcagagcatagcaaccaccctgggaaggcctatgggccataacaaccagttgaccaatcaacatagggcaaaccctccaagcctggaggcacaccaatcctgagcctgtgtgaacccctagacactccccttatgctgccctataagatctctatgcagacgcttcgagccatctttctagccatccaacatggcgggtggatgaaaggcctgagctaacctggggttagctggttaaacaacttcaataaagcctcttgctgtttgcatcaagctttcaactctgcctggtgattggggtgacctctgtcctgggctgagatcctgggggcctgagctcccggggtctttcagttgtctactgagttagtattcagggactatctgtcattttggtctagaacttacatgtagatgagtctgtgattctcctatccagtgtagatttccttcctttccccatcccttcatggcagaataggaacaagcaatgttatagataaagagcaccatgactgagtaggtttcattccagaaatgcaaagatggctcaacatatgcaaagcaataaacataaaatatattattcatggactcaaggacagaaaccacaggaacatctcaatggattcggaagaggcatttgacaaagaccaacgtcccactgttataaaatatctgaaaatcctagattaaaaggagcatatctcaacatagagggccacacatgataagccagaaacaaagattccatcaaatagggaaagccaaagcattggtagtgaaagaaggaatgagagtgggccctctgctttcattcaataccactcttgaagacaacaaggaaaacaaaagggatacatacaaaaggaagaagtcaaattgttagactatctccatttgcagatgacagcatcctgtcctttaaagtcattaaagactccacccaaaacacttagacctgattcacactttcagcaaaatggcagaaagcaaaaatcaacatatagcaatcagtagcttttccaaatatttgtaaaaacaagctgagagagaaatcagaaaaacaatcacattcaaaatagctttcaaatgcccaggaataaacccaactaaggaagtaaaagacatcttcaagtcaaaatttaaaacattaggaaaggttgctctgtctggtgacacaagcccataatcccagggcttgagtttagaggcaggaagatcaaggggctcagctacctgttccacatgaggtaggtttcacaaacaatgtccctcaaaccaaatccaaaaccaaagaggcatagatctccatctaaagaagaacactgaagaaattaaagaaaacattagaagattgaaaaatctcttatgctcatgggttggcaaaattaatattgtgaaaatggctgtattataaaagtgttctgcagacttggcacagttcctatcaatttccaatgccatgcttcacaaaaacagcaaaaaaaaaaaaaaaaacccaaaattcatatagaatcacaagagatcttggaaaggcaaagcaaatcccaatcaagaagaatcatgcagattgatataataccaaacatcacattacacaacagagtcacataaacaaacgttgtatggtacttacacaaaactggatacacagataaatgaaatataatggaagacccacacagtgtcagttaccttatttacaaagatgctaaagaatacacattggagaaaatatagcatcttcaacaaatgtcactggtaaaactggatagtcacatggggcagataaaactaaatgtctatgtctcacctgttcaaagtcaatttaaaggggatcaaatatcttaatgtaatatttgaatccctagaaccattagagggaagacttcaagataaagacacagtcaaggactttctaaaagacagcctctcagaaaaataccaacaattgataatggaatggcatgagattcagtagcttctgaacagcaaaagaaataatcaactgaagagacagccaacagaatgggagaaaagatttactatttatatctgataggcgatcaatatctagaatgtctaaagaacaacaacaacaaaacaaaaagcaaaacaaaacaagcaaaaaaaaacccccaccagaaacacagacaatccaatcagcaaatgatgaatgaaatgaatagaaagtacttataaattgaaataaaaacgtccaaaaaacatatgatgaaatgtcatcttcctcagtcatcagcaaaatgcaaataaaagctctaagattccatctcatccaagtcagaacagcagtcattaagaaacacaaatgctggcagagatggggtggtagtggccaatctactacactggtgggaatggaaactggcccagccactctggaaatccatatggaggttcctcaaattagagctagcatatggctcatctttaccacccctgggtgtgtatacctgaagggctctcagtcagcatgccagagacattcttacatacatgtttactggagcactattcacagcaaccaaattatggactcagcctaaatgtacattggcgggtcaacaattaaagtgtgtgtgtgtgtgtgtgtgtgtgtgtgtgtgtgtgtgtgtgtgtgtggtgtgttgtatgttcagtggtaaggaagaatcaaattatgaagtttgctagaaagtggatataatccaatatcatcataatccatactcagacaacacaacatattttctttcattcatggatcctagattgtatatagacataacacacacacacacacacacacacacacacacacacacacacaccacatgtcgtaaaagcatgagggagaacaggggaggagggatactagaaagagaaggaaagagggaaaagaggaagaaatgggtatggtaggcatggcagtagatttggttacagtctatgacatacttggggaaattgttctcacaaaacccattatgttatataattaatatataccaatgcgccagacactgatggtgcatgcctttaatcccagcactcgggaggcagaggcaggtggatctctgtgagttggaggccaacctggtctccagagcaagtgccaggataggctccccaaagctacacagagaaaccctgtctctaaaacacacacacacacacacacacacacacacacacacacacacacacacacacacacacacacacacacacacacacatatatatatatatatatatatatatatatatatatggtggacaccatgtgggaggtgtctgtctttctgcatcttgtctctattctttcccacagactgcttcccattttacccagtaattttcccacagcacatgattatcacactcagtgaaaaaccatccaagggcctctcatttgctatgaaagaaatttttaataacacagcatggagatcaattccctgtcccctgtgtcacctcccctttcccagcctggccatttatttctcttcatcaggctcttgatgatatagtaagacagccctgtttcagagaaatgtcccatctcagcaagtgactttcccacagtgactattctgccctcacaggaaggaaaagacccttcccccacctaatactcaatctcctgatacctgtttggtggccttcacatgtgtgcaggcatgtacatgcctatgtatatggcggccagaaatcaaccttgtttattttttgggggggggagagctgtttttatgagtgctggatttgaactcaggtttgcatgcttatgcagcaagcactttacagaccgagctgagctatcactccagtgctatagtttcctgaatgctaaacatcatttctttttgccactttcctcagctggaattaaacacaccttctcctgtatttgtgccacttaaaatgcctgtgttccttgcacacagtagatgattaaaaatcttaatttgattacttgataagtgcttttaaaaaagttttttgttgtggcgtataaaataatacagagaatgtggtatgctaataaaaacaaaaacaagtaacagaagtgatagaacactttgagaggtcattaaactgctatgctgtcagtttccccaacaaaacttataggaggaagtctttaacataagacaactgattacagccactctattttcagaaaatttattatttccaaaacacaattaaatagagcattagaaaaattccctgaagatgtctgaggagaaaaatagcatgaaacgctcaatgtgaagtcatagttctaccctctgtattgcttcataagaaaaaggaaatattaagactcagaaattggaaaggattcattttagaaagagggaataccttaaatagagccattatgaaaaaaagggattgtgctgcctttatttcatcccgaattgatgaaaatttgtgatagatcttattggcactcattttctagaagaatcttaatacaacgtgtgcattcttaattagggcactctccaccatgtccagctaagtgctggcaagcaaacaggcattttctatggatgtgtgcatctccctttcactctaaaaccttgtagctctgaattgcattttcatagtcctgaaaatgtctgacagcttcacacactgatgccctgataagtagattcattcatcccctgctcattccctcttcattctttgtccattttactgttcatcaaacaaatggtagtacttctggccccaggtttttctggtctcacccttttctttggccttttccagttcaccacagtcttcattttaatcctcattcccatggtgcagtaaaagccaactcttaccatctttctgttttgtttggcctttcagattaaaggcatgctggatagtagaacacagaactttttgcttctgttttgctgagatgcaaaggctgacctataaataattgctgactctcttcacaccacaaagtgtaatgctaactcatgcatgtgcagcttacaaagaggaaagctccaaactgctctggtgttgtcagcatcaactgggtctcccacagctttgaatggccctagagattgaatatttgtggaatgctgaagggctgtgacatttctccattgggaagagaagcctgatttttctttcttaagtaacatgaccacctggctctctaagtgatttactgaggacactgctacatgcctgtcagagggaaggctgtaggaaatggctgtgcttaaactggcaggacaaaggttcatgtcagtctgtctgtctgtctgtctgtctctgtcctggtctttttgcttagtctgattaatccagctgctgtgctgggatttgctgtatggagagaaacacatgatgaaaggacaatgacctgtttatagcagatattccaaaagatgagcccagaccaagtttggtttctagcaggtctttaaaacgagttggtagccccagtcaacactctatagtcttctgagagagatttaaaggaagaggatccagtgaagccacctaggatactgaactacaaaagaaacaaacaaacatgtccttaggccataaatgtttggggcatttttgttatagtcaataaatgacaaatgtgtctgagaaccaactctagattgtgtgaatggcctctggcctgaggatgtcctaaagggggtcttgtcaaagaggagtgatggtgacagcttggtgagaagggcaccactggagagacaagatctcataggggtcttacttgagcagccagagagaagagatactgcctgaatcaaggggcatagaaccagggactagaggtagattagaatctgagaaaacagtaaatatgacccatatatagaagtctaaaaagtctacatggtgtgcccaggagtctatgatgtcaaatgtctgaaaagtcttcatggtgtgtccaggagtctatgatgccaaatgtctgaaaagtctgcatggtatgccctggagtctatgatgtcaaattgcaaccttacgcatcctttaattctttggacactggcttggaactgggacagagtaactggccaagggatcagaaagaaagactggatagcaggaaagattggctcaccctgtccttttctgctttatatctttagtagatctgagtctcgtgatgagaaataccccttctgaacaagtttgtaattctcgcacttgagcagatgtccctggaattatttgataattttcttattgactgtggacataggctggtttattatcttgaaatggccagagaaaacatgggttcttgccccttttggaaggtggcaaaggctgaaagtgagtttgaaataggggtctcaacatggttgctgacatttgggctgtgccattcttgatgcagaaatgggacaaagtatgcattaggagatggttagtaacattcctgggtttttgtcagtagctactactgtttaacctcaactgagacaactaaaaatttctccagacaattgtcaacatttcccgaggggggacagggtattgtccttaatggaaaaatcactgcttcaaagaaacatggtgaaattaaaatgctgtttctctttgtgctaggaatctactacgtctaaactagatcaataagctgagcatacaaatccaatggagacactggaaggacacagttctgtgggactttgtctaagaaaaccttagggaggtaggaaaaaaaatcaaaacaaaaaacaccctactcctttaagagataagtagacaggaacagaaaaaactattttaaccagtgataagctatggtgcctgtctatggacaattgggtggatgtcataggttgtttgactttgctgcaatttcttgattatgaatttgaataaacttagttgatgaaaaaggagcctagaaaatgttaaggaaaatgtttattgaaatatctgtgagttttcatggcccttcctgcctttatttcatggccacatatactcttacaatgaaatagactttgtctgaagatgacgttgaaagagggcgggtagtggtggcacacacctttaatcccaacacttggggggcagaggcaggtggatctctgtgagttcgagaccagcctggtctacaagagctagttccaggacagcctccaaagccacagagaaaccctgtcttgaaaaaccaaaagagagaaagaaagagagagagagagagagagagagagagagagagattgtgaaagagctcacatgaggatgtcagcagcccagactgagtgtctgcttcctagcctcttcctatggcttattaatgctcatttaatattttttctaataacaaaatagtgttaattgcaggaaattatggaaagtatagaaattgtcaaaagtaaataataccacaatcctctcctgctagtaatgaggactgatcctgtttcaatgtgaaatgtacataaagttacatccttactacaaaaggaaaggattataggttcctaaggacatctgtcataaaaaatctttgttctactcatatgcaggcatgtatctcctgtgagtttttcttgccacaatgcagagctatattctaaggatttcctctctaaaagacattttccctaaaaggtctgcactgatgactgtaatcaacatattaattgtgttgcttagaaacacacagacaaggatgtacctaaactctttgcctttgcctccattaaactgacaagggtggttttgccccttggtgtttgacagggtctggagacattctgggttgtcacttctgggcaaagagatgaccatggtatttagtgggtagatggagaggatgagtctagatgtgctcagatgcacagcccagccccacaaacacagcagagaacaacagagccccaggtgctcacagatttgtgctgggatacacagcccagacccacaaacacagcagagaacaacagagccccaggtgctcacagatcatactggaaacagtttattttgtggtcctcaatatttcttttgcttgcttgaatcatcccccatcccaaatcataatcacactggtcatcagcatttttcataagttttagttatgactattcccctcatcatcattcaaaatgtgacatttatgcagcatgagcatctagctcatgacgtaatggttcctcactgatgatcaccacctccactacctcagcatcacaagaaatgctgggatggacattcctgacctgttctatttatctaataattgttttggggtgggttcctagaattacaattagtgattccaatgaaatgagcatgttctctccacaactttccctgtggagtctttctggtactgtgctctagtacccaaaaggcctctctgtcctgtgtgccttgctcagcaaaaggttgaggtgctcacatcagcactgcatcttatagcctgtgtgtgacctagaggccttgactcccagctgacagcaatatgaggcagcaaattcagacaccatgtccatctgaccctaatatacaactacaaagtgatttcttcaaggaatatggctatgaagatagaggaagaacaggggttgccaaatttccctgttctgtgagctgaacccaaattgcctcatttttcactgaaatgtcattgcatgacacaaacacaaacgtatgcatacacgctttagttagttaagagtttgggccccggggttcactgacaaatgtagttccctacctgcccctttccagcagatggtgctgtttttccaagctttaaattcactacactgcaaattacaacttttgattgattgtgccaggctgctcaagtgtatttaatgaagtctgctttgcactttgctattattgaaattgctcacaggccccaaatcgaatctgaaaatgagatggtgcacctcaaacatgaagccagtctgctcagaattgatgaaaacaatgtgttttaaaagtactgaaggcaagtagatgatgaatcacttccccagagcaatgatgaattaaacttatttcctagcgacataggagaaaatggtttggggacaccgtgaaacttggggatggaacttgagcagggcagttatagaagaccgtgagtcatgctacaggtttcatgttgctttcatggcagatgcctacaccgagtattcctagaacatgaattaaatggctaggtgtcagacattactcattttccaaaataacttgctgttcagatggaagaagaggtgttagttctccttctgaccagcaggaggtgatatgaatgcttcttgtcaatgtgggttacaagacctcgttaacacaactgggagacacagaagaagtctttcttccttgaggaagggcctacaatgaggaaactaggccagtctaaccttcttgagaaatgtcagtctgggtgaggattcaatttcaataaggtaccttgtcttccattcatgaccagggaagagaaaggcctgcttagaatggggagagaacaaagcgagactcacagaaaacagaccatccttaaaattcatcccacggcctgcccatcctcaacaccagtcactgatccacaaagaaaacacatccaagtttcagaagagcaaacgcaattctccggctactgtcagtcagtggtattgctaaggagatgaactatagtaatttctactccaaatttgtaaaccgctatatgaactgttttaggtcagtcaaagaaatgaatgtatattacaagttacctgaatgaggctccccaacatcaacgtgagacaaaacagcatttctaaaatatttctggtgcaaaccaattatggtcgattttttaacataatctggtgttggtaaatgtatgaacccttttatttcacatgaatatatgtgattataactagactcttttaaaaatcacaaataggatcccctccttggacgtggtgggcatttgaatggaggaagggcgagaacaagagtggtgctactctttgacatctgatgacatctcataaacaagtcacaacttatgtatgttaagcgctccttcaaggccattttttttttcttaacctacctcccagttcaggcctttgatactagaacttaacaaacagaactatttgcaaccaaacaggttttgcctcagaaatctaacctgttcatctccacataagctccatttgatgcattcagcatttttgctacatgggttatatcccatctgatgaccaattttattcctggggatgcttagggtaggcatttttcaaactaaaattcaaagctatcagcgactttatagatttgagattataaatattcacattgcaaaatatatcagctaaatcttccaatcagagaaaacctcttcccatgtcaggcaatggattctagtcacacagtttccagcttaaaggtgaaaatgtaccatatctaaggaaattccatttccagtcatgtggaaactgatgtgagaaagctctgtgaccgtcacagttgaagggctcagtactatttgtcagggcctcacaccatagtttattatcagcatcctgaaatatgctttctcagttgtcatcactttgtatctgaattctttgcactctagctctcttttcaagggaagctgggggaaaccagagaaaaagtcttttacgtgtaagctggagagtgcgcatctccttccagtttttaatagataatcaaatttactttcatatgatcatactcgacacataggagataaaaataaccaaactgtggataagacacagtcacatgttagttaagtgataggagcaaatgctattcgcagcacagatgtcagaccaatgggtaaagtaatagaaaacccacagcctaagaaatggcaaagggttttaaaggccaccagcaaagacttcaagacattctcaccttccaagtcaacttcattcattagaaaagtacactcagttttctgatggagcaaatgtagaaagtaaagcacactctacagactttcttggactgcccctttccaggggttcttcagaggtctctgttttttgtaaagtctttttgaacatcgctctgtattctttaagcatgtccattaggccttggcactgtgtagggtgccccatttcctacaaaggggagttggcaaaatcacagccacctgtcctggcagctgtgtaatttacgggaaaactagggggcaagcataatctgcttgggtctcttttccctgtttggcattgccatttctctgttttctgaccatgttccattctactgcagctttctcacccagtgaagggtttctgatgacacttagaggtgctgtgtgtgtgtgtgtgtgtgtgtgtgtgtgtgtgtgtgtgtgtgtgagagagagagagagagagagagagagagagagagagagagagagagagagagctcttgagactcttatttctaagtcaatgaatgcccagcttgggagctagtttggagactgattctttttttaattccagtgagttctgagtaattgtcctatttttcaggctttctggatatttaggtagtaggaaaaagggaaacatgagcttggaaccaaagcagaagacctgggagtgctttctctgggtatggattttggtaagggatattcccaagtcacacagaaaatatggttaggatgtatggaaactgggactctgtgacattaacaatgctcttggcttgtatggcctccctgtttagttcactgtgacaggaagttgagcattttgattgaattctaaggaaaccccatggcaaatagtcatgggtaccaagaaaagcagaaatcaggaggcaccaaaaaacatgttctcagggatctgtgggaaagaaagcaggtgtgtgcataggaagggtggtgactgagcagcctcatgagaggctgtctactgctctgtgctcttcatgtttgagaactcaccctgacattcagccacctcctgtggaaacaaccttgaatgtgtttctgttgcttgtatccagactgtctctaagaaaagctgtggcttctattctgacacagaatggcatttgatgtgtgatgagaattgttgtgattccagccagccaaccatagcttcctccatagtccaggaaaggctcaccacacagtaaggataaagtggagtctacacagccactccaatgaatgccagagaggagttcttggtgtatttagtggctgatttccaacagtcttttagcattgctttctccccattatctacaggggatacaattgaagaaccctgaaagaagtcacaaactctggctagacccatcccttgtgtatttatagctttattctgtatatataacttaggtatattaagatattattgtaggctatgataacatattctaataataaaaggtagttaaggcttatgaacatttatttcttgaattttatatttaatctacacagattatagttactaaaaggtaactgaaccacagtaaacaaaggggtgagaactactggataattctcctacatagtttactccggtctttggagctagagtcacttgacaaattatgctttctaatagcacatttctgatagccctacatgaaatcacaagttctactgggtcctcattgagtctcttcatgcctgatattggcaatgggaaaacctatccttagcacaagcatgaaaaaatggctctccagcgttgttgcctaagagctgcaaccttgccataagctggaaggaatcatacatttttcaatgcctccttttctttctctctttcctttattccctccctccctctatcattccctctattcccccttccttctttcttttctcctgcatcctcccctccctctcttctttcttgacacttggctgtccattcttgtcaccctacttctccatgcactgttaagttaggcattaagattctagttctgaagtctatctttgagaagaataagaacttaggaacttgtatatacaactaccatgtgggatacaacatggctgtttcttcaagacaatttttacgagatatttttgtttcatttcccaaatgaacatctaagattcaccgaataatcaaagagatgcacaaatcctacaggaagtatatggaggagttcctaaataaatcatggaatatcctacattgttctttcttgcattcctctgttttggatatgaagagattcacaagagtcaaaggcataggtgatgggaagaagcaatttcatgttgaaataagtcacattcgtgtattttccagcatagtgctttacagtgagagaagggaataaatggtgactgtttaatttcgttctcaaaagttcaagaaattctctttcttttcacttaatgcagattttctaagaccctgtgtgggtaactgttaggattcattagtgcattaaaagttgtttccccagggggattttcaaacttcctttcatcatctttattatctttttctcataaatgacattttattattaaaactataacatcacttggggatatagctcagtactagaatgctttcctagtatctgtgagatccaatcccatagacacataccccacacacgccaaaaataaatatgcacatattttgtctatttcattcattcattcatttattcattcattcattcctttccattcattgcagtgttgggggttaaatccagggcattgtatgtcaggcaagtattctatcattgagttacacctctattgctattttacacatctcaccacattattttaatattgaagtccacaaaaataaatatatcatttctgtaaagcatagagatgagcactacatagcctcactaatgttcttttaggtgttatgatgtaaagtgctaggttcttaagcagtagtagatactccagaatgtgactgaatggctgtttgcttgtaaaacaaaggggtctatatttgaatttttcaatctcaagatatatccctactttcagtaaaagcaagagcactttttaagatatctactcaacacaagacaaagcctttccagactgttttgttgagatgttgaaaaaaaaaaaacaggaaaagcagagtgaaaggaagtactagagggggaaaatatgaagagtacaatcctctttgttaaatgtactattccaagataaaaatgcaggtgagttaaaacacagagggtctgatactggcatcatacaagttctgcattacttagaagaccaaaatattttcttcccagaagtgattctttgttgttgttttgaaaagtaacggaacttccccttatctttgttgagttgtttaagagtcacagtagtcagtggcattttgggcagttctcagatttgttagattctcaggacccctaggcttctagcacagtgggaatggtccttatagtaactgcattcacatgtggcagcctgaagttttaggaatgaattgaaatgcacaatttgcatttagagaaaacacaaagtaagtgtgaaaaccttttgttttctgaatgtgtttgaggaacaataatcaaaatatgcaaagagaatgttctttgaatagcagtgtacttggaatgcatttcaaggaaaatatctctacaatgaagatatctgaatcacttctgatatgtgagctcttggtggctgaaactggttagacacaaaattgagaaaatagaactgagttgtagtcagagatgaggacccagctgcccccaaaaaggagcaatggaggtaagtttgaagaaaacatttctcatgaaaagtagaaggcaggaatgatcaccatcgcagttttgttttctgcaccattattcttttgtagcatagataaatgaggagaaaaatctaaaaaaatagagttacttagagaaatgttcttttctctaaatgacaaactttttaatatttcacccatgttttctgtattaatagaaaacattaaggtcaaagtttcacaaccagtcttaaaatttgactgccatacggttgctcagaaaaatgggaatcaatctacctcaagatccagctattcctctcttgggtatatatccaaatagtgcatgttcatacaacaaggacatatgttccaccatgttcatagcagcattgtttgcaatagccagaacctggaagcaacctaaatgctctcaactgaagaatggaaagagaaaatgtggtacatttatacaatggagtactactcagcagaaaaaagcaatggaatcttgaaattcgcaggcaaatggatggaactagaagaaaccatcctgagtgaggtaacccaatcacaaaaagacaaacatggtatgtactcactcatatatgatttttagacatagagcaaaggtttaccagcctataatcctcttcaccaaagaaactagaaatcatgaaggactctaagggataaatagaccccaggaatgggaagtggcatgaactcccgagctaattgggagcatgagggtaggggagagggtgctgccacaataagagcacaagaagaagagtagaggagaagaaatggaggagcagagatattgagttgggggaagaatagaggagagagagcaggatgagagataccatatcagagggagccactataggtccgagaagagatctggaactagggagatctccagagacctacaaggatgacacgatctgacagtctgggcagtggaggagaggatggcctagaagcccttcccctagaatgagattgatgactactctctatgctatcctagagtcctcatccagtggctgatggaagcagagacagacatccacagaaatacactgagctgaaatctggaacctagttgaagagagggaggaatgaagaacgaaggggtctgtaccaggttggagaaacccacagaaacagttggcctgaaaaagggaaagcatatcgacccagacgctctttgggaggccagtacgggactgatccagccccctgatcatggatgccaatggggaggcccctgcactcctgggagcctccggaggtgggctggcgttttgccctggtgtgtgtgtgggactttgagagcccatcccacttgaagggatgccctctgtctctggacacatggggaggggcctaggcccagcacaggaagatttggtggacttggtggagcccctgttggggaccctaccctgcctggggagtggtgggtggatggggtggggggtaggttggaggtgggggagaaggaatgggggtgaggggagggagagggagaggggacttacatgtgaaacaagcctgttccctaacttgaattaataataataataataataataataataataataataataattgagataaaaaatttgactgccatagatatgtatttcagaataataagcatatggttgaaagttctctttgtaaactcagtgccgggaatcaggtgagcatatgattgcattctctgaattctcttacttctctttcttcaaagcacaaaccaggcctgagcctccttagcttctaagagcagatgagatgggtgcattcaagagtggtacatccatagatttctcttgctttattaacatgttgatgccaatggtgtttctcttggttgcactaaactgaatgtttagggtacttttgtgagtgttccatcatttttggaatgcatgagagaacatcaatatgtgataagcctcgggcaccttcaagaataacaagaaagggtacagttgttaaatctcactgaacatttaagatgggatagaaggagaatgggagaaactgccatgtgatgattttcggattaggtctggataaagtaaaggaacccaagattgcaaccattggtcaccttaacttcctacccatcttattacaggatggctatcccttttgcagaaaccactgtcttcctttggaccaactgtgaaggatgtaaggtacaagagtgggaagggctatatacatgttataattcttgccaacatgcctgcttctctgtttcccttctgaagtttttattgagcatctctgtgctctagactttgtagcagtcaccagaaatactctacatttcctgcttgtgtagactcacagtgtagacagatacacattcgtacccttagatatgtaattaaaagtctaggtaaaatgttttaagtaaaagaaagaaggttgcagagagttcacacaaggcctctgacctagactgactcaggtttttaaaagaaggttgtgaaaagaagaaatcaaaaggtaatagaacagttatagagcatgagagcatctccaaagatcccacagaaggaagaaacaagaccctcaaagacactcagttgacttgatggaggcagaagccgggagtgcatggccctatggtctctcatcttatttgaactacactacatggtgcctctgcagatattctggtaccagaagttgggtgtttcacactgtggcttgtagagagtagatcacattatacataatagcatggcaaagataagaccatttaacagtttatgctcaaagcactaaaaggctagggcataccttagctcaggtagataacaggagagagtagaggagaattaggaatacatagtttttggatatatttcagagctcaggtggagatttggttatgtctgatacgtgaggtacaaagagaaagtggtttgataaaggactggttcttttgtaaacattatggtgtgtgtggctgcaggcagtgagatagacaaacaggagagtaagagaaattttgttgcatcattctgtgcttcctatatttgccattcttttgagatgttagggtagatatatttactagagagttgggtatggggcatggagacaaaaaggagatgaattggatggtcactgatttatgaataggatctgaattgtatcagtgagtgtagctacagctagagtgaggggtaagcagagatgaggggccatgactagactgggacttaaaattctagcatttaatgataattcttggaaggtaggaagaaatacacaaggttatagaaaatagtaccctagagaaggaagcatttggggaagatgaggcagaagttagtgacacaaggatcaggctaacagatgtttgtgaagtgctggggaaaccatcaggaagacttgagggaaagaaagataaggagaagagaacaagagttgtcaagactttatgaagatctctgacaaagggaaaggcagagagaggatgctgtggtttgaatttggtttgtcctcagtgaaacttgaggcacaattactccataaggcaatactgagatgtggtgctgagtagggcagtggttctcaacctgtgagatgtgactcctttgaggggttgaaagatctaaaaacattggaaaacacagatatttacattataattcatagcagtagcaaaagtacagttttgaagtaacagttaaataattttatggttgcagcatttggaaggttgagaatcgctggtatagggtaaacagtcaaaactcacttctgggttttgaaaacccaccaatccccacccttgaaatctccccccaaccctggaaactctgcccccaagaaaccatatataaaaccaccctcttgcatctttcctgctgaatctcgtgtgtgtgtgtgtgtgtgtgtgtgtgtgtgtgtgtgtgtgtgtgtgtgtgtgtgtgtgtgtgtgtgttttaatgtggtgtgactttgtgctattttttaaatgtggtattccctggctccatactaccaggatacctttttgcctcaaagctgcaacactggtattggggaaactgttcccctcggagctgcaatacttccattgggaaactctttccccaagagctgtaacacttacagttagtaggcctgtgtcttctttcatggctctattattttcttttaaatttgatacaaaaatttaacaatcagtgcctgggaacaattaaagtggccacactcctcaggttacattttaatatctttcatgttacaatccagagaaataatttccatagaaagtgttgaactgggaagaaggaaaaaatgggttctagctcaagaaaatcctgttctgtgataaatgtagcccagtctgatgatgcccaggggagcttttcatctggcctcttggctataaaacctggcagcaagaactccactggccctgaataaaaaggaaagctagcatatctgcatattcatttcaacctggagagtgtgagcagatgtgagtggagaaaacccatacaggcatgggaagcagctagacttctaatcccagttgtcccttgaagaaagctactgagcactgctcagccttgtttcctcatcatgaaccatgaattaaatctaaactctcagagttgggcagattaaaaggatacactatataagatacattatacaggcatagtacctaccagaaatacattcattaacacatcaattatagtaatgaattagggcattttattttattttattttattttattttattttattttttggtttttcgagacagggtttctctgtggctttggaggctgccctggaactagcatctgtagaccaggctggtctcgaactcacagaaatccacctatctctgcctcccgagtgcttggattaaaggcgtgtgccaccaacgcccggctagggctattcatttttacagatcagtttcctcaacttcttacactacaacggggacttcataatttttacttcataaccttggaagacttgaatatgaatggctaactgcaggcacaattgttttcacgccaacagaatgaagatgctgcctttcttttgcccaggtctctcttaaggggtggtgggtagttgaagcacatttatgggttgaactgcagagtatgctggactttgtctttggggcttcgattggatgctacgttcagggaatgagaagaaagcaagaaagagcaggtatgcatgatgctgcctcacacaaggccagtgcagcctgaggaccctctcagtggtggcaagtgcttgaagaatggcttacttgattgattttgtgcaattgtagcagaatacctagacaagatagcataaggaacaaagaattccaaccaggcaggggtggtacatgcctttaatcccagcacttgggaggcagaggcacgtagatctctgtgagtttgaggccaacctggtctacagagctagttctaggatagccaaggctacaccaaaaaaaaaaaaaaaaaacccgctgtcttgaatccccccaggaagaaagagagaggaacacacacacacacagacacacacacacacacacacacacacacacacacacacacacagagagagagagagagagagagagagagagagagagagagagcgcaaaactctttactacaattctgaagactgggaagtccgaagtcaagaggttgtctgggtgacagtgcaccatctgagcttgaagacacaaggaacacgtgtaagaagggagggaaaaggtggtgctcacatcagcatccactcccacaatctcagatccactgctgcagtggtaggtgcaaccaatttacaagggcggaaggaagctagagatttagccgcctcctgaaggttcctcctctacatacttctgactggggctcaaggatccaatatggaacaccagtagacatactcaaatcacaacaaaggacacaattctttcagaatgtttcatcttcagacccaaactgcttctcagccctggcttccttctaaaccaatggatcagtcttctcatttcttccatccctgattacaaagtttgctatttctttctcagttgtataaaaggtgtttttttttttttttttttttttttttagatttgaaacatttcaatctgcagggaaactccttaactccttaagcaagaaaggcaaacaacttgggatagcttctggaagtccctgaaactgaccaggttcacagagctcctccttgccagagtaagcaatgaaagccaagtgccctcctcagactggagaaagctgaactgcaaagatggcagagctgccaagaagactgagaccacactaggctacaaagagtctgagacctgaccagctgtccagaaggaacagaatgtagctgagctgcctggaagaggtttagaccaattgaggcagccgggaaagggcactctccaacctgttgatcgggctacaggctgtgcaatgtgctctaggatcccagctttgtgagctgtcacctgtgctggggtgagcctaggtgacatactgcatctgtctttgaaccatctctgctcctgtaagcagctgctcacccaaatttctgtaaatagccccaataaaagtccttggttcaccttgctgaactttgatggtatctgtacgttggtttgttgtagtttccctagctggtatgagtagatttgtgtgttgtatctccctgggaaaaattttgtcacacaacagtctcccacccacagtggaaatgcccttttctgtgaggacttccccaatgctccaggcagtttgtctcttctgaaggcccacaatactttcaggcttttgaatatatttccaccgcaatactttctgggttggatttaattagattgttaattactttgcctccctcatcagattttaagcagcaaaggacccagtacacatttggcaccatgcagtaatactctggtgctagagtgtcatgttgtttaataaatgttgaagtaaagaatggatgctggggctaccctaaaggacaaggctgaatgccttgtgtgtgtttatctctttgaaagaggaagcacaggacgctggttacacatcacggactgcctacaaatatacctatcccctggcctacacatattgaacctgcatgacattatctatccccttgttctctcacccatcagtgtgtgtccctagggatctgtctgggttatcagacaacaagaactctgacgaaaatagctatttctaaaactatgtctgactactagaatagttacatatttaaatatgtgttctgcttagagtgtgagcagaatcatgtttgtatttataacaagcataacaagaaggcggctttcacagaagccttgcagggggtggagggtggggggaaggaaaatctgtgatatgaaagtagagagaaggaataccggaggttaaagatttaagtaagaatgggggccaggaataggaaaaggagatgggagatggttagttaaccaaacccagtggttgattatatatatgtcttatggaggcacactgtttaggcagctaaaaacacatctttaaaaaaagtccaactttgaaaagaaaaaaaagtttggtcagaggtaaccttcatgagtggtcaatgcttccactagaagtcatggcttattacatggaaatctcagtgccaagcatgggatacctacataggtcagagaagccagaaagaactccccaaacagcacaggctattgccattggtcttggttgctaccataattaggtggtaagaccctattgttgaagacaaaacctaattgggttttaggacacaggaaaattaagcaagaaatgacctaaaaacctcttttctaatggctggctttcatatcgccaaaagatacacaaactgttagggaagtgccataccaaatccagtagattctgtgtgacaagttccacagactgaggtgataacttcaaaagaaggaggtcttctggaaagggttgtggaactctcggccggagaaaaatattgagccatagttctcatggaaatctctgttcttctattcttttctcatattaatgaaatattcctgaaagcctatgctgacattttatttatttatttatttatttatttatttattttttatttattggcttttttgagacagggtttctctgtgactttggaggctgttctggactctctctaggctggcctcgaactcacagagatctgcctgcttctgcctcccgaatgctgggattaaaggcgtgcgccaccaacgactggctatgctgacattttaaacaaaagatataaatgagaaactgtcccctgagacgtggccactgaccatgacctcgtctccaggaaaaccagtgcttttcaaatcattcacgtcattcacataagtacaaaatattgatgaaaactttcccaacaataaaatttcatagggctgccttcgtatttggagcatagatgttcaggattgagatttcatcttgatggacttttcctgtgatgagtatgaaatgcccttcttcatctcttttgattgattttagtttaaagtccattttgttagatattaggattgctacacctgcttgtttcttgaggccatttgattggaaaatcttttcccatccttttactctgaggtatcgcctgtctttgaagttgaggtgtgtttcatttgtgaaagaaacattactaaagctcaaaccacacataaaaccacacacacttatagtaggagacttcaacaccccccttacaccactagacaggaccaccagacaaaaacttaacaaagaaacagaggatctgaaagaagtcatggcccaactggggttaacggatatctatagagcattccatccaaactcaaaagaatataccttcttctcagcaccacatggcaccttctccaaaattgaccacatagtaggcaacaaagcaaacctccacaattacaaaagaattgaaataaccccctgtatcttatcagaccaccatgcattaaagctagaattcagcaacaatacaaatggcaggaaacctgcaaacttttggaaaatgaataacacccaattgcaccattcctgggttgaggaagaaataaaaaaacaaattaaagacttcctagattctaatgaaaatgcagacacaacatacccaaatttatgggacactctgaaagcagtcctaagagggaagttcatagcactaagtgcccacatgaagaaactagaaaaaagtcacattagagaactgacagaacaactgaaaacactagagcaaaaagaagcaaactcaccaaggaggagtagacgccaggaaataatcaacctgagagctgaaatcaataaagtagaaactaggaaaacattacaaagaatcaatgaaacaaagagttggttctttgagaagatcaacaagatagacaaacctctagccaaactaaccaaaaggcagagagagagcacactaattaacaaaatcagaaacgaaaagggggatataacaacggacactgtggaaatccagagaatctttaggtcatactttgaaaatctgtactccacaaaattcgaaaatctaatggaaatggacagtttcctggataaatatcacttaccaaaattaaatcaagatcagataaacaatttaaatcgacccataacccctaatgaaatagaagcagtcatcaaaagcctcccaaccaaaaaaagcccaggaccagatggcttcactgcagaattctaccagaaattcaaacaagagctgataccaatactcctcaaactgttccgcacaatagaagcagatgggatattgccaaactccttctatgaggctacaatcactttgatacccaagccacacaaagataagaataagaaagagaactacagaccaatatctctcatgaacattgatgctaaaatactcaataaaatattggctaatcgaatccaagaacatatcagaaaaatcatccaccacgatcaagtgggcttcatcccagggatgcaaggatggttcaatatacgaaaaaccatcaatgtaatccaccatataaacaaactgaaaaagaaaaaccacatgatcatctcactagatgctgaaaaggcctttgacaaaatccaacatcccttcatgataaagatcttggagagaacaggaataacaggaacatatctaaacatgataaatgcgatatacaccaaaccaatagccaacatcaaactaaatggagagaaactcaaagcatttcctctaaaatcaggaacaagacaaggatgtccactctctccatatctcttcaatattgttcttgaagttctagctagagcaataagacaagatcaggatatcaaagggatacaaattggaaaggacgaagtcaaactttcactatttgcagatgacatgatagtctacataagtgacccgaaaaactctaccaggaaactcctacagctgataaacaccttcagcaaggtagcaggatacaaaattaacttaaataaatctgtagccctactgtatacagatgataaactcaatgagaaagaaatcatggaaacatcacctttcacaatatccacaagcaacattaaatatctgggggtaacactaaccaaaaaagtgaaagacctgtacaataagaactttgagactttaaagaaagaaattaaagaagataccagaaagtggaaagatctcccgtgctcttggataggcagaattaacatagtaaaaatggcaattctaccaaaagcaatctacagatttaatgcaatccccatcaaaatcccaacacagtttttcacagacattgaaagaacaatactcaactttatatggaaaaataaaaaacctaggatagccaaaacaactctttacaataaaagatcctctggaggcatcaccatccctgacttcaaggtctactatagagccatagttctgaaaacagcttggtattggcacaagaatagacagatagaccaatggaatcgaattgaagacccagatattaacccacgcacctacgaacaccttatttttgacaaaggtgctaaatccatacaatggaaaaaagatagcatcttcaacaaatggtgctggcacaattggattcgaacatgcagaaaattgcagatagatccatacttgtcaccatgcacgaaacttaagtgcaaatggatcaaagatctctccataaacccagccacactgaatcttttagaagagaaagtgggaacaacccttgaacaaattggcacaggagaacgattcctgaacatcacgccagaagcacagacactgaggtctgcaattaataaatgggacctcttgaaactgagaagcttctgtaaggcaaaggacacagtcagtaagacaaaacgaccacccacagaatgggaaaaaatcttcaccagccccacatctgacagaggtctgatttccaaaatatacaaggagctcaagaagctagccaccaaaacaccatacaatgaaattaaaaagtggggtgcagaactaaacagagatttttcaacagaggaatctgaaatggctgaaagacacttaagaaagtgttcaaaatccttggccatcagagaaatgcaactcaaaacaactctgagataccacctcacacctgtcagaatggctaaaatcaaaaataccaatgacaacctatgctggagaggttgtggagaagaaggaacactcctccattgctggtgggagtgtgaacttgtaagaccactttggaaatcagtatggcggttgctcagaaaaatgggaatcaatctacctcaagatccagccattcctctcttgggtatatacccaaatactgcttgtccatacaacaaggacatatgttcaaccatgttcatagcagcattgtttgtaatagccagaacctggaaacaacctagatgcccctcaactgaagaatggaaagagaaaatgtggtacatttatacaatggagtactactcagcagaaaaaagcaatggaatcttgaaattcgcaggcaaatggatggaactagaagaaaccatcctgagtgaggtaacccaatcacaaaaagacaaacatggtatgtactcactcatatatgatttttagacatagagcaaaggtttaccagcctataatcctctaccccaaggaaactagaaatcatgaatgactctaagggataaatggaccccaggaatgggaaatggcatgaactcccgagctaattgagagcatgagggtagggaagtgggtgctgccacaataagagcacaagatgaagagtagaggagaagaaatggaggagcagatatattgagttgggggaagaatagaggagagagagcaggatgagagataccatatcagagggagtcactataggtccgagaagagatctggaactaggaagatctccagagacctataaggatgacacgatctgacagtctgggcagtggaggagaagttggcctagaaacccttcccctagaatgagattgatgaatactctctatgctattctagagtcctcatccagtggctgatgagagcagagacagacatccacagaaatacactgagctgaaatctggaactcagttgaagagagggaggaatgaagaacgaaggggtctgtacctggttggagaaacccacagaaacagttggcctgaaaaagggaaagcatatcgaccccagatgctctttgggaggacagtacaggactaatccagccccctgatcatggatgccaatggggaggcccctgcactcctgggatttttagacatagagcaaaggtttaccagcctataatcctctaccccaaggaaactagaaatcatgaatgactccagagggaggtggactggcgttttgccctggtgggtgggagggacttcgagagcccatcccacttgaagggattcgctctgtctctgaacacatggggaggggcctaggcccagcacaggaagatttggtggacttggtggaaccctggttgggggccctaccctgcctggggagtggcgggtggatggggtggggggtaggttggaggtgggggagaaggaatgggggtagggggagggagagggagagggaaagtatatgtgaaaatattaataatttaataaaaaaagaaaaaaaaatttcatagggctgtacaattttaattgtgagtaggtttaaacatttggtaaagaaaaactttttttgttaagaaaaagtcaaaatagctcaatatttgaaagactcacaagagttaggtaacgaatgttaaacaataactgaccataaaagtttattaacctgatcttagaaaataggcagttagctgtggttagcctttaatgactttctgatttattgttagccttggataagttgtatttactgtgcctagtaacaatgatgtcatttgttctatctggatttgcttcagtgaacacaaattctgagaagctatgctttatcctggataaaaagccttgcttgaaagctacaaaatacactcagattcaaactacttctgggtttgtttctgtttgtcatcaccgaatccttacctacctactcttcaagaacccttatttcagggacccccataccctgctggggtggtccgtggcaggtaagaaaactcaccatggacttattcaacagtgcaccctgtatgctataatatcaacctgtcagataagatgtgcctattggtgtaacagtgatatagcacttatggggcaaccaactgctttctgatttgactccaggcctgctccagaggagacaattcatgcctagtattataaactagtattatatagaatatcctaagatcctggccctaaaggccataggccctagggaagaagctactagtgttgtgttctcaaattgatatgctagcaaactgccttctaaatatgtatgcttacaataatggattaatactgttctcaacttggtcagagaagctcgtttttttgcagtgagcagcaacagagactcatgactgttgagtactcagtcctaaataggccatttatatctactgctaacccaaaggctcagggaatacagctgaacaggaggcagtaagagtcagaggatgaggaatattgctgagaaatgccatcttctggacaccacatggttattgcacttatgaacttatatcagctttgttatctgaaaaagagctacaaaaggtcaaaccagttaatacaccaatgaggatgagatagcattctcccctgagctgaggaaatattggcaactgatggtttctctctgtgtggggggtggggactcattttttcttcggatatgcggctattggtaggtttcccatgccccagtggatggtcacacattcatgtgcataaaggcagaattaaccgggcccagttggttacaaaaaaaagaaaaaaaaaaaaaggaagaagagcagacaaaggtggcaaagggaatatggggcaaggtaggggtaaattgggtcagatatgataaagagatgctgtatacgtgtctgaaattgccagagaataaaaaaaattaaaaggtgtgatggggaatgtactactgtttatgtttatcttattgattattgaataaaatactgtttggccaatgagacagcaagttagacagaactaggagtcaaagaggattctgggaaatgtagtagagaagtgctgatccaggcaggaagtgacatagcaaggagactcatatttaagcgaaagagaaacaggaagggctctcttttttcccctcagctcctgctccaacagcacgatgtgatccaccagctaggagggacgccaataaggcgtccgataagataagtcttataaaaatataaagatgtatgataattgagactgagctaacagatgagagtcctagtcattggccaagcagcattgtaactaatacaagtctttctgtgtattcatttgggcctacctcgggcaggcagctgtcataaagctcacatgtggcagtggggctcaggcggcttttggcataaagatttatagtaaaaaaggtgtcctttgctatgctgttcattcagaaagtgatcacatgactactgtgtggccatattctatagctctgtaaagcttcaaggcttagaaaaaggagaatgtgtgacctagttacccaaaagaacaaaaggcctgtgagtatctgaatttacacactttccttccttctagtgctttccaataaagacctctgacatttatctcagccacaggattcacataggcaacaaaatgcagcaaacatacctttcctgggggcagggagtaaaggggtgactgcttcatggaataactttctaatttacaggttcagcctccaagctttttaaactcaaatgcatgacctaaaagtactgtaagttcagtaaaaagaggtaaatgaaatagttaacatatgatgaagtatgcctgtcctttaataaaaacacctactacttgatcttcaatatattttcagagattttaaaaagccaaaccttcactcagttacattctttaagttccatgtggagaccaggaagccacagacttttccccaaagcaggagaaatatttccatcatctttagaaacagtggctaaggatgcggttctgtcctctaacgatattgaaagaatatccctgcattaactcctgggaccaggtaggagtgttcaagatgaattgatgagaatggcaaacctcacttggcaagtcattgattattcgctgaccacacacaagttagcaggggtgcagtcatgagagttgagagtgacctgatggacactgactgacctgctggttgttttgatgagtctgggggtgaatggacagctacaattttacctgtggggtagtctggtgacttttattttaaaccaggcgttttacaccctgtgatgtcttgacaacagatttcatagtagagctcacaggaatgggctgtattcttaggaaaactgtccttgtggttggatttggaccagaatcctgtgttgaagctcagctgacttcaagctttggcataggagagggaattcaatgacatttctctgttatgactcattggtgctaagaccttccagatctcagctctttggggcacacaaaggacacacagctgatgactacttttcaatctccactctcagaaaaacctgtagaagtgagttagcctacactgtaaaccttgcatttctgattcacactcagacaatgggaaaaagtgtttggaagcagttccacagtgttgagggacttggtttgttctacatgttagcacaactgcagcacatggggaggggtgggggagatagagcaccttttcacagctgtgcattgtaaaatgagttaagttttgaaaatagctggttaaaatagtatgtgttcacatatgtatacagttgaagtgaaattatatcatttggggtgataatgttctccccaggaaccatagactagctaacaaaatcccagcatcagacatgagaaatcccctttctacatgttgtttaggggagttagagactccccaaaccaaataggctattgctgttgcccttagttgcctctcagaagcgtgtccccattgctgaagaccccacacactttggtcacaggcctcagaggagtcaaactggatctgaccccaaagccttcccctgtactggaagagctttgcagactaccaagagaacaaagcatttaatggtcccacccagctgtgatgactatgagctacaacaatgatcagaatagaaagatatccccaaagatgaaataggggcatttatatcttggcaacagccaacagccatctaagtggagttaaggcctgctgaacaggagggaaaacacaactggtactgaaaacctagcaaccacttgatactagccacagctagtcaaaatacaggtcacaattgaatctggagtgtaaattccaactgatacatctacagtgcagcccttacatctaaatctcagggaacattgtgaaagcaggggcaggaaaattataagagttagaaagtctgctgtgaggttgtgtcctatagataagacatggaagctccacacatgaaataccaatactgtggatgcctaaacaaggcccgaacaatgccaataccagtggacatgccaataccagtggacatgccaataccagtggacatgccaatgtgaatgggagaaaactcatggggccccatccctagattaagaggtgcaggcagttaaaactgctgacagagacataaatcttgctcagaaacaagcattctaaatataaatagttatccaataccaagtagttggcctaaagatacacaaacagcactgagcagattcagcaggttatatttatatgcatattaaagaataagaagccatgaatcccataggaagcatggagtgaatgggaacacttggaaggaggaaagggaggtggaaatggggtagttatattttataattaatacaggataaacacagaacatgatactatcactaaggcttagtaataagtagaaactactaaagtagattcagaaatgaactccattaaagtatgttgggacttttctgtaaactcagattagttgaggccatcatgtctacccaatactgtgtaagccagtacattgtcagtacttcagtagtactctgccatctttagcatttacaattacttccatgatttttgttaaatattctatttctagattattggttctcatcctcattctgaaagtttctttttccttgtcccattaaataatttctaggtttttcattttcctttctcccagtagaatttctttcattaaaattactagattgactctccatatcaccaaaaagttgtaagaaagggggctggagagatggcccaacagatacttgctgtactttcagaggattggagttcagtttccagcacctacatagtggctgtaaccacagatatcaggcatatatagtatacatacatacatacatacatacatacatacatacatacatgcatgcaggcaaacattcatacacatgaaaattttttgtatgtgttttcaagacaggttctcactatgtagctctgactgtcctggactaactatgtagatcaagctggccttgattttacagaaatttgcctacctctgcctccccatcctaaatgtttggattaaaggcatgtgctactatacctggctataaaaatattttttaaagtggttagagaggaagatttcatagagacagtgaatgtggaagtagatttatgttctagtctgtatgttagccttacttcacaactgttcataaactaagatctttggacaaatttttaatctgccattaaccaatgaggtttatgtattacttactctaaattcaacattttaagggtctaaataatatgaggtttcactgagaataccaaatatgctgatgttttcaaatagtgaacttcatttttgctaataaatctttgccaggttattttaaacaataatgtccacaataactgagggaatgcaagtctcttgtgagaagcagagaaacatattttctagttgctcatcttttaagaatttaaacacattaaccagtagtacatatgccatcgaccctttgtgatggaacttcacaagcaaactaactttgaaatatggctatctaaaaattaaggtcttgttgcacagatcaatggatgcctactttgtagacactgaaaccctctttccaaactcctggggcaggagcttatagccttgaaatccaagatgtgctgagattcccaagcacatccttcagaaaataatgcatactgcttatagtcaggccaaaaagctagcatttgaagtgtacacgcccacaggttagccatagcatctaaagaagggtatcagcatgtaacccaggctggcctagaactcacaatcttcctggctccactccctgtgtgctgggatttctggtaaatgccaccacatctagctctactttatacttcccagtggtgacttttgagtcccgtgcaagcttaccaatgctgtgcagcttcctcttttgtgctctgttttttcatgcttctggcttcatccaaacctagtgtgtcttccctttcatctctgctgaaccatcttaggccttctttatagattttgcattctctaaatgtttttaaatggtgtttgtttgcatttagccctcttctcatcatgaaatgttttaattctcaatattatttacttcttcctctttcaacttgacttagcagctaaaatttcacttttagatcttcatctataattcacaatgtataaagcaataatctatacaaggaatactggtctaaagcagttgaaatataaatgattctccatgtcacttctcttgtgaaaggtggggcatagcagatagtggctcgcaatttcaagcaatcatggaaacagaagagggtactggcagggcatggggaacaccaaaaactagatttgtttcctttacacttttgtttaaggttgttactcagaatgcctaccaatagtattgtccttatatactagagaaacttccaaagagagcgagggtacacaccttctatgggggctcattatctgatgatccctaaagcttctcacacaagccaataattcttcctcccctctgctcacatgtgttaactcttcagaaggatttatgattcaccactctaatatcagcaggattgcaagagccagccaacctcaccctttcccaccatgcaggctctgcatggcagcagtgaaatttaccttaattctttgaggaacagtctcctgagttaaatcaacaaatccctaataggcctagagtgatccaatgtactcacagggttgactttgcaagtagaaaactgaaaagagatacctcctaagaaaaatgcaattaaaattcatattgggagctagactgggaagtctacaggcgagacagctcaatcttttaaatgtggtgctgaattatgaaatgattgctacagccttccccagacctctttattcaggcatcccctggcccttgggaaggctgttctcttcagcattctcatctattgatgaaattaattaatcctgctgatggcatagatgctgctctccgaaatgggaggctgacaaggaactagagatgcctctggggttctacctgatgagtgaactctccataattacaggaaatgcattctaggtgaagttaaagagagttggagatgcttgtctaccatgtctgaagcaaacaactccatcagatgagtggtttcaactgtgaggtcgtgaatttgaggtacatgtaggtcatgttccctatagtccttctgtcatttatgcactgaccgatatgttaaagtctagatacaacttttaaaggtagatacagttataacctccagttaggcatgggaaaaactcagacaaataagaaaatactgaacaaattcactaagtggtaacatggcaagacatgatcagagctcatgctcaacaccaggttatgttaactccaggattctttgaaaatttgttaggactccattggaataaagagactgaaggattggaagctaataggttgggctccagagggcaggttagtctcagacccttgctcttagtgttccatcaatgcaagtacttcttgagcatgtactaggtgctagtactttgcctcccacttatggggccaggaatatggtgggaagaatggaaggaattgtagaaatacttgtcagagaaggccttggtgttaaagctgaggacaaggaagcatcaatgaggagtttgcggacagagatgggaggagaaggaagaggaatgctttatttatctggatgtagggactgagctaagggctccaggaggaagtgttgggacaatttaataattgaagtagtgagtagtcatcttaatgagggtcagcaatagatcttttcaggtaaaataattaccatttccctttaaaatgacagctgtgctatatttctacagtttgtccatgaagcatgcaagcctggtatttgaaagccatggaatgctatgggaattttatgggcataagtattgtatttgtcctgggccaggatagggggctggtagattctgttggcatattaagtgatgttgaaaggaaagaggtattaaaggccccaaattgtcagcttttaacatacacggtgaaggacccagggggttggactgtaccaactgagcaccgggcttcagttttcttcaactgaatttcatggaccttctgagtatgcacagcactgtctggacaatagatatgagtgctgttgggctcctcaattcagctagttcctactccaactctgctacttgattaaaaaaatgtatgtttcaaaaagtatcagccagaaacctcttcaattctattttttcaacctgtcgtttttttgtttgtttgtttgtttctttttagaatatcatcacatgctcttcattttccttttggatgacatttggttattatctgacacaactgatcatgctgtctaggttagcagaaactaccagagcaactgactgcatatcagctgcgacattttccagaaaaatggctttaaaagtagaaggcttctttttctccagaagtatacatataaccacccttgttagagctgactttgggatgcatgaatgtacacaagtgcacacacagacgacttagcacttaaggcccagagaggcagtgcaagcaaatgagagacaggtatatacatttaggtcaaaatgcaggagtctaagagttcaagggaaaagagaagatgacagaatgaagatgagagagtagcttctaaaccaccctcagtggtcctgcagcctgcaccaactgtctacaaatcaactgagtcaagaagaaccaaggcatgatgggaaatttcattgttgggggtttttctagcaggagttactagtcgttccttccacctttctcagtaatgaaaatcagtcctttctggatgtgtgtatgccttccctggctattgtctatgctagcacagcacaccaagttcagaaacaactatatttatgaggtgacaggattaaactctgacttcagtgcttattattagcactatacttactatcaaatcacaaaccttggatgatcatctataaaacaagtaattttgaccattggctttcaatttttggggggttaatgaaggacacaggggagaaactcattaaggggccacaaggccagggctttaatagtttttcaactcacacactattttgagatctactgctttgggggattaaagacaaatgggggtaacaggcacctggccatccatcactgttgctggggatcttgtggtgaaatggaacctggcatctcacattgaaactcctacatgagtatcatcattaactggatgcttgactcagtcattcaacttatctcacccatggtgtcctcatgtacagagacaagaatgcccatctctaggagacacggatttaatgaattgacagaggctactgacaggtactggttgaagttgattttttttattttacatgtggatttatgtttttttttttaaatctagaatcttctagacacaaaactatttgaatttgactctatgaacactgtctcatgatttttctaactgattgcatctctctctcgtgcataatgtatggctgccattatcatgacagtatacttttggcttaaaaaaatctaatactttgattatattagatacaattgtatataattctattaagttgcaggcaattaaaacatgtatttgcttttctgtcctcacttttaagcactccaccctatttcttacacccatttaataaccagagttgacttttcctgaaaggtcaaggaaatactttgttctgaggcttaaagcagtagctacttactgtgatgatcctcttaatttatgacaaatagcttggctaaccacaaacacagatcacagtcgatataccaggtctctagattagccctatacttttttaacctcttccacctataaaaataatctatcaatatcttcaaaacagatgatcccaagcataggttttaatgtgttagttattaagaaaaatggttttaaaatgatccctcctaatgagatgtaatacaagtaacagaatctcattcagtctggcctctgctctagttggctgttcaagggaggaagtcattggagagctcgaggtggatgaatggaagccagaggaaatcaaatgagcagcatccttaatggccaccctgctggaggaaccctgatgccagcaagcaagagggaagcaaatagcttaagaataagccctggagcaaggtatatgtttctatgtgagtccttgttttttatttgacttctgcatgggctcaactgttttggaccccagagcccacctccctctccctttgcatgcctcccacttcctttagttttgttattccttttattgctgtctctttcttttcctctgatctttctccttccataaagaagcagtggatggagaattagtctattgcctcgtaaagacctcctcttgacagatggcccttcttgtgttatgggaaaaggatggaccataacatcacctgtcaccattttggatgcctccatgatgacagcttacaccagcaagtggcatttgatttagtgacactcagcacagaaacatataacagaattttacagttttcttctgtcttccaatgttccccgattagatagtgacaaggacagcattagtagtataaatcaaaaagttttaagtgattctttatagtttacaaggaaatgcttttacccccatttctgtggcaagtttcattttctcccatcatacaaagacaccttattttgctcaccaagaaaaaacccagtcatagcctcagtaaaactaggtgagagatcagaatcaatgtaagtttgatcaagatttacattaactatgagaaatcagcagaagtagtgttgtcattcattgggccacattcaattgccccttacatttctaggcaacatgtttaatttaaaagtttttcaggtggggagattgaaggcataggacaatttcctgagcattgcaggtgatctatgtgaagctagtgaggtgaaggtctgttaagaacaaaaggacaggaagaccctaccctaagttcctcggggcaggacagagctcttgcatgtgacctgccagtgacatcactgtcctcatcattctgatgacatgtttcagaatgttaaccacaggatgaaattatcttcatatgctttgtaatattggtccacacagcccatctcttctaagaatataactcctatgggttccagaacagtatcaggttcagcaaagctgctctactacaactgattttaacaaatgaattcttaacctgttaagcatcatttttgcatttgcttaatgaacaaaatcatacaacaacctaccttgctaagatgctgatgtatctgaagaaaaaattacattcacataagacaatgtgggtaagattaaatcccaaggaatgttactccagctactacaaaacattatgctatttcaaatgtttactggcttgaaattcccaactctacctccctcatctgattttagctgactgttgttaagttgtaaattgcctgccttgttggagaaacattaagtagacaagttcttgtcacttagcaaccattagcaactttaaaatgttgagcaagttaatttggaactaattttcaaatggagggaagtctgagtggtgcagatggggagatggagtctctggggggaggggagaggagaaggaagaagaaagggagcatggtgtggaagatactggtgtcaagaacacatggggatgacaaactgagcctgagcgagggagatcattattagccttgaaccgaaagggaagcaagtcctgcatttagtcaacattagtttagttgtttgtggggccggacagctgcctccttttgtatcacttggttcttggggcaacccttttttattctagggattgaatacagagacttgaacatgccagtaagcactccatcactggattataatcctcagtcacctccttgggatcttactgccctaaccaccaagtaactagatattaggtatgataggagcagctcaatgtcacattatccctagttgaaaaagaaaactggggacggggatgataattccatcagtgatgtttgtcacccaaacaggaagaactgagttcaataaccagccagcacattttacacccaggtggtgttacacacttgtcaccccagtgatggggaggcagagacagaccggtgtctaactaagactcattgtcaaatctgtaagtttcaggctagtggaagatttttccaaaaacaagctggatagcaatagcaagtgaggaaaggcattcaaggttgatatctggtttctacacatgtgcatccttccacacataaacatacatgcatgcatgcatgcatgcatgcatacatagagagagagagagagagagagagagagagagagagagagagagggagaaagggagagagaatgatagtcaaagctttaattttgaaggagacaaacagcatagtggtaaaagaaccgagtcagaaagtaagatccaaaatgtctccacttgaggaggtgacttatgtctctgtttactaggtcatctggaagttataataagagcaagtattaatatttagaaatcactcaggatgtaggccatatatgtgttgtatgattgcagataaggatatatgaagccaacagttggggatacagggtctttcaaagctttaaaagttatatcttggttattttgcacacactgaacatagtcatgtaggagcatccagaccatgaaacagagtattactaggaccccaaatcacatctcatattggttacttttctcagtcctatgtcaaaaatgagggcgaagggtctgatcatggcttgcagttaagagagggtgtaatccattatggtggagaaacactgaaggggttcatggcagtgagaatttggagctggaacacttcagatgttccatggaccagggaatggagaacttcttgtgaaaatggccagtgtatgaccctcaaggccctttgccaccaaatatctactttccacaaatagtccccatcttctaaaaatgcaacaatctctcaaaaataacacctctaactggggccctaaggcttaaacacatgacccttcgggacatttcatattcaaacaatggcaccctcgcttgttccatccttcactccaaagaaactaacattgtgactgctaaaaaaaaaaacagtcctgctgactttggcacctctaggaaagcaaccgagcagtatggaaccctttctgcctgcacttaatattacgttctgtgagaatgcgttaagtggcaaacatttattctcatctggatggtattctgtttgcaaaaaatatgacaatatgtagatccattctgcagctgatattcatctcaacagtccctgaatttaaaatagcaatactggaaaccctgttaataccaagcagtaaatatgtgcatatgttttattaggtgtgtgttttttttttttaagtaacagttttagaacataatgctcgactctaatcaggtttagaatacactctaaaagaatacttccactacttgtgagaattctactttgatttttctgttgtagacagactggggagggagcacagggagtgcctcatttgtttcctctttgcatttcctcaatgactaatgaaaaatgagcacccaatactgtaaaatgacacgaagatatgaacttcatttatttttttcctgtggtgaaagcctgtagtctctgaacccactttttctttttttaataactgccttcattttaactaaagcattacagaaaaatacaagtcccgattttgaaactaaggactttcaccatttttatttgtatgcaacttgtatttcttttgaatgtggagagttatcctctggtaatagaaaaaaagagagggggtctgccccaaaacaagtttccttttcctttcactgctcttcaaagtggaattaaaacattatctcagctctgcaggcagctaagagctcaggagaggaggagggggagacagtgaggggagctgacctacttctggaagctcctagacgcgtttttcggtgattgcaagatgctttcgagaaccaggtgtgtgtgtttagagggagaaggctgagcttatgcataagcatgaccacagggacggacccacccttgggtactttgtgggggaatttgggattggagctttcaatttgaagtttcactttctactttcagcatatgtgtaggtaaccaaatccttctgagggaaatccagtaagaaaaaatattttctgctataaaatgtaaagacactgagttgttcctgtctgtacatttacatgggtacacaaatatcagtccacatggtccttactgtcacaataggcttggcatcagccaggatgcagctccttaattttatattcacacacagaagtcactttgctgtcaccttttagatacaacactaaactgctccacctttacataaaatgactccagttaatatatatgtaatatgtaatttattcttggtttatattcaaatcatacaaattctaccttcctggagctgaaagaaatgtcttccctaatgacttctttaatttatattatttataaacgtatatgcattttttatggggtatagatgatgagtcatgtctgcctgttataacattgctggaaacaaagaggacctgactgtctcctgttgtacggtgagttctgccctcctctgtccttctccatctttccagtcatgacacactgaccttgacagagagccctttgatggctttacgtttttatttatctgtaaaacactgcctccacaacccacagagtgggcttcgggttaaagattaatgtatctcttgggaattggggaaactatcttcaaagtcatggtttaggtcacacaaagtctattaaacaaacatcaccctcaggaatttagaggctgcaaatgcaagttctgctgccccagtaggggctgtattctaaccactgtgcatgccgagaggaagctctatcactggtgaccccaggagtgagtaccacaaaccctcaccaatacactgaatcacttctggtaatacattttcctgaacgactgacaccatttgcctgattaccaagaacattaattaatgcaggaagttgctaattttttactatatttgtgtgtcatgaatggatgctcatgtgtgtacttgtagatgccagagggctatgtcagatgactttgtcttatcattcttcaatgtattgtttgagacagcatttctcactgaacctggagctcactgtctatacaggctgcccagcaagccccagataccttcctatctctgaccccagtgctggaattacagacatataccaccaaacccaactttttacacgggtactagaagtctgaactcagggccccatgcttgtgtggtgacaagctatttactcactgagccatctccttggtcctaggtgctcatgttttcactctcaggctttcattttagatcctgactacaaacaggactgctgggttgatgattgtggcatttttctcagctagtgattttagggagagagattcaatgcctccagcttttatatcctcatgacatgactcagcaattataccaacactttctgttcattcgattagcatataaatgcctatgattataggctgtgttgtactaacagtcgtgatacatgtgttcacagaactcttagaatactgggaagggagtggctgagatgcagaccctcagaaggatggttgagattgttgatagtgccaaacactgattttggaataaaactgaaaaagtttaaattgtggttttgctactctgtgactatgtgactttggacaagctacataactcctcttgatttagttttcttgtttgtacaatgaagataataacaacctaatgcagacctgccttgatgcctatgagctaatacatgtgaagatgcttacagatgacttctacattctaaatgtcactgttgtcataatctgctgacagaaagctggagtgtgttgtgcaaaaagtagcttaggcagctatctcatgaaatatcctttaaaataattttgcataaaaattagagactaacttagggatagaaacagtggctattttaatagcatcattttaattttcttaatttctacacatggcttgtattgctaattatttgtaatcagcctccactacttttcatcagatgaaataataaaagaaatgcctttgtttttaaaatgaaaattcactttatggtatacgtccctcattgctgaagtcctccaggacagggttttctgaaacctctgagtaaaagggcagttgatttactcttccttgacttcttcagcttcactctttctactgtgctaagcttcgactaggccttgagagacacgataaacctgctgggttgactcccttttaaagagcttgccgtacagtgagataagcagataagcctatgagggccaatgacaatccagggtgtatgaaagcctcagtggaggaggtgaccccaatgctattagaacacaggctgagacagatggaatgaggcagggcagagctgggcctggtccacagagccagaaggcattctggtaagggaagagcacgacttccagatggctacagctgcaggtgaagggcggaggtgagactgacaatgttgacaagggcaagatcctgggagagccctcctccgtgctatgaagtttgaacttaaagttgctcaatggaggaccaacgaaggcttttaaagacacaaagatgatggggatttcatgtacggccacgtgagtttttgacaagtatgatgcagggctctggaataaagttcagccttcggggggagggtgactaggggcaggtgggatgttggggggggaggggagggagagggagaagggattgacatctgaagcaagcttgttcctaatttgaactaataaaataaaaaaaaagttacagcctctctttttaaatggtagaatcagtccccctcctttgtgagctgggagccactgtcagctccatctgctttcctttcttaggcctaagccatggggcaaactgactcctgttagaattcccatggaactggaagctccctgattgctaacttgacaatgggataacgcaaatgaaatttgccttggtatgacagatgagatgttcataccctgtttactaaggtctgaagaaaaatgattcaaaggctcgcagtacagtcatgatctttccgattgagatggtaaaacttctatagcattgcgatttctagcaaaatcatctaaagctgtattaaaccatggagaaaataagtagagaaatgacgctttttctaagcaacacatgtgaaagatgcatctaaacttacagtgggatatgacttgtggcctcaaggcacctgttagagaacctgccattggctcttggagagtgccaagctagttagatcatttctcaagcatcagcaaatgctggggcaaatggaattcactaaaatgagcctaaaagaagaaagttgttattgcccataagaacctgaaagggaggctggagagatggctcagtggtcaagaacattgctcttaactgttcttccagaggactcaggttcaattcccagcacacacaggacagctcacaattatctgtgactcaactttaagtggattcaactccctcacaaagacatgccagtcaacacacacacacacacacacacacctgaaaggatactttagatctcatcttgcttctccagtcatcagcgtctatttttatagcacatatatttggtaatttttaacatccatttttcaatttccagcctcctgtgtttcctggtctctagtaagaaaacatttggctgtaatcaactcagctgaagaatgtgagaaacaattgccagtgctagatttgtcacttcagaattcatttttagtagatgcattaataagtaattatgtttgaatgggtggatggatagacatgtcaggaaataatgatgaacctcatgaatatttcttcagttcagtgtgtatctgatctaacacaatctgcaaaccatatgtaaaggtaatttttaggagtgaatagtgatgacattctattaatgctacaagttatcaaattgtgagtgagagtagttaagcaactatcatcaccacaaacaagctacagctcgtccatctactttcgaggtctctaaaagtagtgaattcaagttggacagagatacgccttgaaccccaagactgactctctactatattgggtactacagggcagactgaaacatagacaaaattggcttagggaagtttaaggcaataatgttcctcaaggtgccttatctgggaaaccttgatcaaatctccagaaaaccaaggcaatatcctgggatgaaaagttcaattttagccatgaatgagaccacattcttggctgtagtgacttaatgctaattgtcttttattgtttgatgactccatggcactaatggaaacacattttccttcagtacatttttttattacttaatttatgacttggatccataggctgggctggttttgatactatgctggcagttatgttggtttcttaaatggtgccttcgaatgtgactttatgtgtggaatttatagtataactcttaatgggtgctttggtcatgacccagaagacctttactagtaagatgtcactggaattaaatgagcaagttctatgtaacagaagtctcttgattttgggaaaaagagaatatatgaaacatacaattctgcagtccctttcaggcatggtgatttattttgagaccctccaatggacaccaggaatttgcaggtctacaagatgtagctgatttttagagaagcctaaaatcttgtcttcagggaatgtagtcaaaatccatgagagaagtgatcaaggagagaatgatgggaagccatttagggataagctcacatgcttgctccttcgctaagggagaagggaagccaggcactccttgaggctggaatgagaaattaggaggtgtctggggtggtgtttcttgtagatgagtgggaaccagcagctgtaaggtatactaaaacaaggcaagacatggtggactggatccagaatataagggagagccactggatggacatttaagcacagatgtgacaaaattcaatttgagttgccaacaaatcagaaaagcattcaaagaatttttcctgccaccatgtcagatgctgcatgggggtgtgtgtggggttcctatactgacctatatatcttagtcatgctctgaaaactaggtactcccatactgacttacactggacaatggtctccaacagtgggagccaatacaattcatgcataatgaatagcttaagttaaaggtgagatctgcagcatgttctgagactgtcctttcccaccgtggggaggctttcctgagaatgttctgggtaatggtcatccagttttaaagtgctgttgattttcagggccgcctagccacttgagtctctgagggtcaggctgttaagtgtcaggatttatgattgagacactgtatctataagcacccttttgaaaagaaacctggcctagaatgagtcaacccttttaagggaagaatacagtgggagatgtttttctccgattctccaacaaaatgaaaataaatcggttaaaagaagaacacaacagcatttccacaaaataactggcacgtcaaggaacttcagatacttcactaaaaccacacattctcttttcaaaagccagaaagtacacccttagaatcttgcttgtatgttataatgcttagagggttttaggtgaccatagatgccattgttcagtattaggtcagattattgtaggatttggttaagaacctatggatctgggccataagctacccataaagtttcaaaggaaacttatataaacacaatccctgaacttagtacaaaatatgccactgagctaggaagggtctctcaatgaactctacagtctgaacaaggtaggtgtaaagacaaagtacaagcgcagcctgaaggagctgcctgtcctggagccactctaccaacctgagaaggtcttttaaggctggacttcagaaatagtgcatgcgtgcacacacacacacacacacacacacacacacacacacacacacacctttttaaaatttgattttatgcatgtgagtgttcttcctgcatgcatgtctgacccaagtgagaggagggcattggattttctggtaccagaatcacagaatcacagactgttgctaaccaccatctgggtgagattcaaatcctactcctttggaagagcagccaatgctcataaccactgaagtgtatcttcagctccaggactaggtcttaaggaactgcactgggaaagaaaggcaaatgcagagcagctttcgagaatgaacaggagtgctccattctggttccacggagccaaggacaagaaaatagtaaaaaccttgggtcagatttgagcctactgcatactataaacagccatgttcttgctatgtaaaaatttctgctctttacagaaccataattatttaattatgggaaaaatgatatttctctataattccttagcatgtaatgtatcaagttagtatattttttgattgaactgtgtcagataaataagtgcatctatctcattaacgtgcacatttggattcatcttccgtaaataaaattgcatgtctatcaaaaattattttaaaataaatttcctcatgattgattaccagtaaatgttagctttgtacgcgtattttctatacctacatactaagggtcacataaaagtttctcaggtagaaaaggggtttcccgagctctgcactaacccagcattcagtaaagcactttgcacatgtccatgagggtgtgttgctgtgggacagaattggatgggttgtgcagaagtatgcggaaagaacaagggatttccagcttccctcactgcagccctctaagctgcagtaacaggctgtttccttgtcttcaatattgatttcacactattaacagcatcttttggggtgggggaagggcatgcctcatgtggtgttttaacatttactttggagagctcttactaaattaatgattcaactcccacgcagtggaatcttagaatagtaactgggtgatacataacaacacagggacacattctagttacatatttgaaaacttaacaaacaaactccgattggtcatttggacatttggtttaaaacttcagtctttctgtgcccatgtgagcagagacacgggaaagcaatcctgtgccagcttgtcttctgttgagtttgcactatctctcatcctgcgggagaagcctgggctccccacttcctgggctcccttgccagctgtgctccaatatgaattatgcccaaggctccacttgcagaggatctggaaagcagatccagcagcaaccagggcggtggacagattcctgatgaggctttcccagggagcaccatgctttccttggaagcactgtgagtcactttctaagttgctgcagggattagaatgcgcagccacagcttcgctgggctgtgtgtgccagagttcctgaaaactagaagccctgttctctctcccctgagcttttgcagctcactcagcagttgcatcagcctccgtgtcacagttgcttctgcagaccttgtgggctgtcttccttagttaccacccccccccccaaaagccaacataatctcctaggtgcttctcgattcaatcaccgtctttgctgtccaacatttttagcttactgaaaacaagtagcaatcatactactacttttcttctagagaatacttctctgccacaggcgacagtaacacctacaggcatgccctttggagctgtttcagtgttgaggctggatgggctgagggctattcttcgatctcatttagtttctttgtctcatttaatattcttcatttatttttacatttcctgttcatgcctttatatattcttctctgttccacatgtttgtatattaatagcactcataaatagcacacttgatacttggttgtgtgtgtgtgtgtgtgtgtgtgtgtgtgtgtgtatctgtctgtctgcctcacttcatctttacgattacttagaacttccaatcaaatggaattgtgtttactttacacttcagaaacttgagcccaacgtagattcagtgacatttcagagaccattcaggaagttagggcaggtgttaggattacaactgaaattttttttttaaatcactaatattctcccaggtgacaaactaaaatggcagctgacagggcatgaccttcctgagatgggaaagtgtctgccagcaaaagctccatgtatctaggttgttattccttataggcagaatcccattgatttgatttttactcttcagctgaacatggcaagctcagtggtggctgtagggtgactggggcagcttagctgggggtgccttatatacttggtaaactgggtgagtagaaaagtaatgaggatgacaagaggttggcattaatgctgacaacctttccgcagccaatactaattattgggctagtctctagcaagtgactaatcaaataagaggacctcccacagctaattgatctgtttggcaatgtcgcttgaagggcacccagctgagaatcctaagaacttaaatgtttacttgttcaaggatagcttttccaagaaaagataaaggcactgggttagatctgctgtgacagactgcaggctatacttatcatatgcatggatgtggaactcagttctaagtatttcttctcttctgaaaaaaaatgatgcaaaacagaagagccagatttctctcagaataaatcaaaattttcctacttaaaaaaccgtggattctattaaccaattcaacattttcactcaaagatagtacttttaaataaaaaagatgagggaaaagttgtaccttgcaaaaagtcagcaaggcaaatggaatagttgtggtcactcgtcaagatatcttaagtgactaaaatagaggtgtatgtgccatacatgtgtgtttgcatatagaatattataaatgaataattcttgattggcccacttgtaaattaaacaaatctaattttgcattatttaaaatgccttttcacaagtctatgcagttaccatgacaaattacagtgcaagtggaaccccaggcttgtgagattaactcttttcacttggcaggatggagatccccaacccactaagtgagtttgtgagtattcattataggttagccatgggtccaggtctcatttacaaaggtgggaaatattctaggttcaaagaactgaattggaacaccagactccagatttgccactcaagagttgtagaataatgtatcaggtaccattttgcaaattatgttttcacatcttctagaaaatatcaaatttaacagtagtttaattatttagtattacacatgactcacagttgattaatgaataaatattcccttcaggtttttgaaaacctcataataaccagatctttctccaaagccctcaaatccagcagttgccgttctctccctgcctctaatctccctaaatgtcacctgggacacactttctagagaaagtggcccagaggtttagaaagaggtttattatcctgtacacctgcatcaggagtaacacatgtggtgagtgcacccagaggcttgcctttgcaactttcagcttacacagaatggaatttagagtggcttgaagtcactgccatagttttgatctgtaatagcccccagagatccataatctaaagtcctctgctcagcactaccaggaggtggcgggaccattaagaggcaggcctgatagaggactgtagatcactggtagttaacctcaaaggggaagctgggctctcattgttttctctttcattttacctttccaccatgaggcaaacaggctacttggccatgtacatcattcaagatgtgcaaccaacctaaaaattcaattatcaagtcttatagaaagtaaggcagtaaccaacccagaacagatactttcaatgctgtgaatcaaagtaaagcttttctttaatttatttcaggtattttgttacagtatcagaaagctaacagttacttttgcattggtgtttctccctaattagtacagtgcctactatatgatgccaatgaccaccaagtgggtggtcccattccctgaacttggaaaacaagttttaaaagtaggtttatattgccggaataatttgttttgctctacatgtgtatgaaactctttaaaggcaacaaacatgcacatgaattcattcactgaggtcatcttgatagtaacagttacttctcagtaagtacaaataagcacaactaccttatttatccattgcataataactgtttgtttgggtatgtgtgtttttttcaacctaatgtgtccctaatcccccgtacctccatgagtaattatgattttatacagcctcaaacaagatgatctgagcaacagacaccacctcccttgctctccctggacctcccacatttagaagggtgagatctgagtgaaaacaacatgaaggagatggaaaggcatcatgtttttgttcagagaaagaacgaatggcatgtttacttggctgcaaagggatacattctccttaaaaagcaaccctctgccaagtctttggcttctgtttgttgttgttttaaaggtaaacacaattaagagagaaaatagcaagtctttaaaagcacagctgagtgtttatgttttccttctaaggcttctgggcttgtttctgtggatcttatttaccattgaacatcacaactactcaacaccaccaaaataacttctgttgtggagttcagagggtgggaaaagagctttgacttcacaatgtctaccttttccaggctcctttgtaagtctttcaagtttgaatgccactgttacaattttctctcctgtttctgagaagacagttttgtgccctgaaaactctgttatcacattttacaagggacacacgcactacctgatggcatcttagtgactctatcctagataagtagctgtaccgacaatgggacctccaaatgtgttaattactgtttcagcacattcccgagtaggctctatgaatttgttttaccagagagacaagcttggctcttgcctgtatgttagtgatagctcccctcgccacctcttaacccactgcacatctgctaattcactggattcttgtatttcagacctgtgtggagccaaaactaaaactaattccaacaaattaaatttctaaatcaaaactcacagtgtatgacaactcattttaacttcttggcaatgtgacaggaaaagaaaagtactggtgcgggattaacacagtgtcccaaactctgctgtaaatactcctgggagaccccattgcttgttctcagtgagccacagaacacttgcagcttgcaggaggtttcatggcaggcaactttttaaagttaaaatataaccttatgattagaaaacactttgggactcctggaagattccttagagacataggccataactccttaatatttcatattctgaagcattcaagaaagatggagaacactcagaaataagagaatttaaaatttacccatgtgctcaaaagaatattgaggacctgtaactatctggtgtcccatagtaggtgaacatccactgaaaacaaactggcagtcgacagtcatagctgtggaagatgtgggggtgctttcacagggatatatgcagcgtacgtaacatacattgaatcacaatcatgtcagctacatgctgttcagaagcagacccagtaatccatatcagtttccccatgaccaccttgtctgcgtctctgccttgcattgtgtcctttgtccttatttctgccccgatcaaagtacccggtagatttgttctgtgtaggtcacatttcaaagcataccacttaaagtccttctgaacatggaggaaataatggctcccaccagggcccacgtccccttaatccctggagcctaagactctgatttcctccttggcacaaggaacttttgtgatgaactaatcttgagataagatgaccacaggggtcactgtgaccttcaaagttccagaggggaaggaagagggcagttctcagagcagagacagggtgatgcaagcagtgttgactgatatgccttgaagatagaaggtgaagccactacccaacaaatgcaagtctccaggagctggggacaccaaaggacaggttcccgcctagagccccagaagcaatgcccatctgccaatgcctcattttaaccaataagccttgtttttaggcttctgagctataggaaacagtgtgataaatgtgtgtgtctgaagcaagcatgcttgtattgatttcctgcagcagtagtgggaagccagcccacttttctctctgtctcttctcatttcctgaaacactggtactttaagctgtgctttgtcagcaagcatgcttaacagtccttcagcctgcagctccaatgcagcagcctgacacaatgcatgatacccctccacatctcagggaacctttctaagatcccatcaaaggtcctttcatttgcaggaagtattaataaacagcattcctattactttgagcaaatggttaactttctggaaatatgtttacttcttcctcaaattaatttttccagaactcatgtcatattaatttcttgtttcacttacaattcctagtgtgaaatcacaggcaaaatatgctaaaaaagacactaaatgtgtatttatctgtctgttatttgtaaactgagatgcatgaaataatgatgcaagagcatttactatatgctgcctcttctcagcaacttctcaagattaacagtggcagactatctgttttttttttttttttttgaagcagcatcctagaatgactgtatatggctgtggtgaatagtgggaaacaaaaacatcggtaaaagtattataaagataataggaagttaatgggtggacagagaaggcattccccagaggcacattctccagaagaaccactatgctttagtacaactgtacaatataaaaatggatttagcctttaaattggagcacttttaatgagacatttatgtggcctgtgacctccaagccatgttcacacactcaggacatttcccaatgaagagaggggagagacaatgatagacatccccattatatttaaaaccaagaacctttccaagattgagttgaaattaaagactatcctaaaagactccaagaacacattttaggacatgcttgaacaggaggttgtatgacaaaaagaaagacacacaggtatacagacatgtacacacacacacacacacacacacacacacacacacacacacacaataaatacataaataagagccagactcttaataaactgccaaggttgacacccaaactcactttgtttatggtcagatgaactttcaagtctctctggcccctgtcctggagataatataaatacctaccccatgcttcagtaagaagaatgaaaaaaacctaatgcatacaaagttatcagtaggatgcctggcatactgaatcctcctgaaaggtatgctgtaattactgtcatctctgaagctcatttttggttacttatataatcttttggagcacaaaccaactgaacctgtttaaagataaatggagaaggagcagcacctccatgggaagaaaggacaaggagcagagaattacccagcaggattaaagctaatgtaaaacagtaggccttgaggcaaggtaagtgctgtcaaacattgtgatgtaattcctaccttcatcaccagcattgtgtgtgtgtccatgctacctgggggagtagcacaggggaggataaagcccacatcgtttctggtaactggatggaaactgagcacgttctatgtggcacatccctagtatcattatcataagtgacttcaggataaggaaggaaatatgtattctaggactgttcatggatgtttgcagaaagatggttgtcatattcaaagtcaagagaggtgaccctggagaggagagagggcaagcagttgagggggtctaagataactttgtgggaggctggcattgacccatgtcttatcctggtggtggctgcacagatctgttttggtgatgattcaccgaccttcacattgacatctatgcatttctgtaaacgtaaaccttcacattgacatctatgcatttcacactaacatggctacataaagaggcttagaagggtcaaaaagacagccacattctcattggaaacatctggcaaagcatcgctttctgcctgtatcatttactggttccagagctatggttccagagtgattagaacctgtggtagggaagcacagaagcaagtggcaggcatggtggcaagacaagatgctgaggactcacatccccacaaggaagaagcagaagggttgaactggatctgggcttttaatctcaaagtgtgctgacagtgacgtactttctgcagcaaggctgtaccactaaatctcccccaaaagagccacctactggtgactaagtgttcaaatacctgaaaccatggggaacatttatcattcagaacaccacaatacccacgattctcaaactaggcatggaaacctaaagccttctcaaagatctgttgtctttacagtggatgatcaaagacttgagtcttctgaatcacaagtccctctcccttgaggttcctcaattgtttttttgtttgtttgtttgtttccaaagatgactactctgggtagccaacattcgatgagcagcaactaatgctgggcctgtgcatgggcttggaataatctagagcagagaccttctggttaagaaactctaagataaatttctagcttcagtctgagcagatacgaactgtcataaataacaagtttgaattatagccttagacaggattcctgtccttgactaattttcataaatcataatttgtgtttgagtaatgtatattttaactacccactgggtatcagataaatcatcctttttttaaatgtctagtttgctttcaaccaatcatgagaattttacaaatcacaccttttgatgcttttctattatatgagccaataaaaatttatagtaatctatgtttctctgcctcattgtgcagtaaacaaccctgtgacagactgcctctgtatctgatgttgctgatgtcatcgcctgacacttttctgactcccatgcgttcctctagttaacccctcatttcttctcaggctgataaagcgtattttttaaattcacaaaagtatctgtgtatattttaatttttgtttagagtgtgtgtctgtgtgtgtgtgtgtgtgtgtgtgtgtgtgtgtgtgtgtgttagtgtgttagtttatatacagatgcacattggcttacacaggaaagaagagggtatcctatgttctcctctgttattcactgcctttttattttcatacaagggtctcttcctgaacctggggctaaagctttctttgctgggccaagagccagcagcttgcagagatcctcctattgccctgtctctgcctgccttggagctagggttaaaggcacttgcgtggatgcctggcttgtggctggggtgctggcatctgaactccagttctcacacttgcaaaacaatggaacttaaccacagaactgtctctctaaccccgttggccattttcctcttatatatactacatgtctactgatgctgtactcatagaagaaccaaggaaaacatggcttctgtgccatttaattgaataatactaagaccgattttaaaacttgataataatcaataataataaacatactaagatttgtagatatattgcatttcatcacatttttttttaaaaaaatggagtgattgtgaattcaaattcacagatctcaatacaggtgggaactgttgcatgttgagaacaactaaaaagtcacacatagaagaaaaagattccttagggtttgtttgtttgtttgtttgtttctgtactataaaaaacaataaacgagaaatttaaatggaaatctgtgtctcattttggaagacctaagtttagtatgttttgactaaatgagaattttgtaattatgaacttatgaactcacaaaaaacaaaagtgcagaggagaggacccctctgtcccttgtactgttcagagcttgaggcttggctgcctttcctttttaagctgtggttttctcacaatcctctttctatcttctggcaagtgtgtagcataattccagttccatagagatgctttcagagtcccagttcctggggaatattcagtaccgaagagctccaaaaacagagaaatctctatgggctagaagagggtgatcaaaaattctgtgaaagagggaacttttgacctgcatttgagtggtctgcatttgaatgacaaaatacagatttcaaatgtgcttttgttttcagtttcttaaaaacccaaataggaaaagcccatgagtaaaaggagagctaaagttagatacactttttgatccaaaaaaattctaagtttgtgaactctaaaactgccccaaatagagttagtcatccattactctgctttatgcaaaaacatgcctcttgtgtacccttgttttcctattgtgctcatgggaccagtgagatgttaatgctcaagaaaggagtgctttgagccaaacactcaggagcctccttcctgagtaaataaggttaaacagtttcttttgcaccttctcagtaccattgtgagcatgtattgaaagacaggggtatatgttagaggtttttcaaaattactttgccacagaaactttctcttggttgtttccagagtctaatggtccttaatggtacactggaaaagactgacacacccagtctgatgtgaactccatggagagtaagctggtaccatcaccccactttacagatgacaacaactgtgagtgtccagcgagtctctatactagagccacacccaaatctgttgttactacttccagacatgcagctagcataggaaatggttcacatgtgaaacttggtcggtgggctttggattgtacactaatatctgtatccatccagacatgatacaaccagggcactgtgagcagaagtttgagcaagggcatcaacagacagagctgtgtctgaatcttagggagcagtgtcttcctaaacaacctggatgaatcagtagatgtctctgaacctcatctttgctgataatggggatgttagaatctgtactgcaaggtgactatggacattggtgctaatgcctgtaaatattcccacaggaacagcaacattcctagtgaaagtaaaactaagtgatgcccagcagggtcatgctaagaggagactcctaagacccagcattctgggtccaaatcctgagcattctcctgcaccagagctgggccagaatctctattagagtaccatgaaaacaaaggtaaattaagactaattcatcaatgaaatgttagagactctcccaaggagggagctggtgctggtgaagtgaatttttgggcagagcacctgttttctgagccctgggctggtctctttactttcccactcctctcctctttgcaatcagtttttcttcctgagttttacattacttccacgaacagcatttatgtggcatttttgtctcaagtacatccatagtaaattgaaaacccgaagctgggaggaaactgaaggaaacgagtcccggtgtgactgtttctaggcagcaaggcttatctgtgtgacacatccctgactgcatataatggtccagctggaaaggtttccacttgggactcatgtctgccctcactctcatcccacttgctggcagatctcagcgagaacatctggagaatgctgtttactacagatcttgttcatgaaagatacaatcctacaacatgacactctggattttcaaaaagaaaaacccaaacggaaaattgaatttctcttccctccctcatttaagagataaacccgacccaaactcagagaaatttatttcaatcttttgttttgtttttaaatcctacttcacatcatattcatttgaggaagtactaagtggtggtttactttctcagactctccagggccttatataatccatggctattatcacttttgtaaaatttgggcaatactcactcaagatcgtcccaaagtattgtgtgtctgtgtaatcttaaatcctagactcatataatttaaaagctgggttcttcccctctttaactgccttatttcttcacacctgtgcctcaagacacattctgtgacctctctggtggcagcatgttgaaagaattaaaggccatcaccacaaatggttctgggtcccattctgtttttggttcactccttcagtgattcttattattttgctactcaggccggaaggaccagcctccatccaccattctatcagcacacacttaacaatcataatgtgaaaaatgacactcgaattcctatgagggtcagaaatacattactggggagaagagagtgagaaatcctgagtgtgtgaaactgttcagtacctcaaaaacaaacaaacaaaaaaacccaagaaatttgtggtatgttgtctgagcaaataaatcaaatctatatttggaatttttaagagggcatggtgaaataagtggagcatggtctagaaaagaatgactgaacatacagaaggactttggaaggggattgtcagattttcataaaaatactgaatgacaaggtgttcagaatttgatactagtctgtttcttctaaaatgttaaacgtttctatcttgtggctgttctatggtgtgtgtgtgtgtgtgtgtgtgtgtgtgtgtaagagagagagagagagacagagagagacagagagacacacagagagagagacagagagagagagagagagagagagagagagagagagagagagagagatcgatcatggctatacttgatttctctgggtgagaacataaagagtttatgtagatagaagaattcaaggtagaaatgactaagattgacagtgccagcccagcaagaggacttagtaagtaaaggtacttgcttcacatcactggcaacctgagttcaatccccagaacccatgtaaaagtagaaggagagaagtgactccacaaagttttcatctaacctgacctacctattcatgtacactatgaataccatggtgtgcataccttgcccaaacacgagaatgtgtttagcaacaccagagaagtagaaataaatagaaggcacagtgaattgctatttcttacccactaggatggttacaaagcaaatgcaaagttgtaacaattgatggcagaggtatggagaagtcagaaccctaaggcagagttgggagaattagaaaatagtgtagttgcttctgaggggagtctggcagtctctgaaaattaagcaattatcacaaaacctggcctttttcttcctggtagacaatccagaggaataaatatcccaaaagatgcagatccaccctattattcagaatgaaaatagaaataaccctcatgtttctcaattgttgtcatatacatcacagtaaaaatatttttcaactccccaaagcaaggaagctgtgatgacatacaacaacacagatgcagctttgacacatgatgttaaaatcacatgccaaagaacacactgaaggcacactgagtatgatacaggggtgtgaaatattcagaacaggcccttctagaggtaggataccgtgtttgcaaggttctgtgaggggaggaaatggtaagtgactgctaattcttgagggtttttttttgggggggagataaaagtggtctgaaattacatgatggtgatgggcacaactctaggaacacattaaaatgcactattctgtgctgttctaaaagacaaacttcatgccatgtgattgaggtctcaattgggctgctatttatttattcatttttttttttagcagtggtgttatggggatttttttgtttttaagatcttgacggtcaatgaggatttaagtcagtatagattattttccctcttttatcccaaggggaagagagactactcataatactgttaaggtttcacacagtaaactttctccagctgggtgcccagcttggctaactacatggagaagcctggcttcagaagcaaaggctgagattaagtgtgatctgctttttcctgccctcacttcagaacctaaaccttacagagacacagccaccactaaaaacctgctactctgtgatactttggcttttcagctttgtgatatttatgttttttttttttctttcgagatagggtttctctgtgtagctttggagcctatcctggcactcgctctggagacgaggctggccttgaactcacagcgatccacctgcctctgcctccggagtgctgggattaaaggcatgcgccaccaacacctgccttatatttatgtttttaatttttattatgtctaatataaagatgaagcaactggggccaacttcatttttagatgacacagatagttagcaactggaaatctaatctgttgaatgatagtctgtagggtttggggcttgtagtaccacgttggcactcacaaaattttggattttggagtattttggattttgggttttcctagactcaacttctaataacagaatgctcaagtcaacatctccctctaaggttgtctttaacatcctaaagaatctgatattctttaattagttattctgtaattgaatttttgaattttgtctttgtgtcttattgaaacgtttccaaattccacatcccttctttgcttaaaaacaagaacaaaaagaaaactttctcacttttatctgaaaactgtcaaagaaaattactgcatgtgaaaactgcatttgtcatgttagccaaagaacaaaggatttccttcaaaccataatgaatggcttctttcaggactagactgctgacatctttggtttgtagatggttaacatttgttaaatatcacttccttttgcctgtgtaatgcatttatacatatgatggctttaacaaatagaaacttaaattgtttttaagattgtatttttaggtataaattgttttataaaactatctatctatccattggtgagaaactgtaactccttcagaatgtacaagttcattgaaatgaattctgtataatttacagagctttttgaagagcttgttcagagtaatttgttccaacttgtagtccttttctactgacttttctttgttgttttttctttctttcttttcaatgggaaatagttcttcagtagagtactgataattgtttagttactaggtaggtgaatgttttataagccagtaaaaggagggtgcaaaagaccaggatttgtagtgtttgtccattttgatgacataaatgagtaatgctacatacatgatgttccaatgtggagtagggaatgcttgctaagatcctgagtgtcattgtttcatttgctatcttaaggagctgacctagaggcctacccgaaagtcagggagaaaaaaagaatctcatcggggtagatcatgagtattccttgaagtcattactatgtacgtagtttataagtttctgagctttatttacttattatttttcttatcatttatttaaaccaaccaagaggagaactacctgaacatcagtatatgtgtattaatccttgtcactaagaatgaaacagggttgtggatatgtgagttcttctcagatctgtgccaattcagccaaagcaggcaccatgtgatgaacacagaaaaggagaccctgtaaatatcatcttgccataacctgttactgacataaatcagttctttgaactaactagatttgcatagtcagagactaagtggccttggctatcattcaacagatcagccctccagttgcttcctatctgtgtctcttccaatccaaatctcaattcccagtttgagacataatccatgggcagtttcatttacctgcctctggtggataaccagttcaacctcaaaggtcccttagcattttgactcttcatttgctaatcatgagaagagatctcctctaattctcagaacttattttagaaggcaccttagtaaaggaatggacatttaagcaatatctgttactacaaactcagaggccttttcttgtatgttgagtaacacataagtctatcaatcataacagttttcctcacttttgacataaaatatgtgggtttattcccataccaaccaattctccatttctccacacaccaagtgggtgttctataattcaattctgacactaactgcctggagttagtgggaacctcataatttaagcattctgtcctacaagactgtattcattttagatgatcaccacaagtctagaccagctgtatttctgaatgactgacgggatgtggagttgaggattcctacaactctttcctcaagttcagaaatatgcacaatagcccacagaactcagaaaactaccttacttctattcctttctcgttatatagggacacagttcaggagaagccaaatgggagataattgaagagccagatataagagcaggtgcttccatgatgtttctggagtatcagtaacccctacgtctcccaacctagaagctctaaaccctgtcacagggttgttgtctatgcagacttaataaagtgactcattggtggttaacttccacttcagaccctttctcctccatggagctctggtttgtacctgaaaagtttaacatcctaaagaatgaagcattggtctttccagggactggattccaacctgaagtcacctaggaacctactaattaagcttttattagaacaaaagacactcagtcagccagaaaattgttcgttttagaagctcagtcaggaaagacttggacaaggaccaagaagactttttttttttaatcaccatagtcagtagagcaatgattgacagctctgtacatgtgaattgaaagctgttttgatgcttcccagagcctctgcctgcttctactcttaagtcttgtgatcaaagcaaatgaagtctagctagtaaagtgtcaaaaaattgccctataatcactttccttcaacactgtactttgctcttttccattgtccagtcaatattactctaaaactcctgtgaggattcccctcctcaaaacttaagttctttcctttccaagaaacaataattatttagcatctacaacagagatgtcccaagggccggagagactctagctactgaaggttatttccagtactttctcttctgaaacaccatgttcaggagaaatgtactgcacttcccgttatgaggcaagacattgcacttggtattaatgtgccatccataaaatcgaaatctttcataaagcataaatgggacaaaatggaagcacattagctttggtgggagacagcttggattcttgggaggaagtttgtaagtttcatggctaaagacttactggtgacctacagtctcaaatcatcatgggcggatgctagccttgttagaggagataaacctacttgttttcaagtgtcatacctataccttctccaccaataccaggcagaaacatgaaaaatgatattttctccttctaggaaatatagaaaatcaaaagtttgggtgtttttgcccctgctggataccttgacatttgtcatctctagggaagaattttttataatggagaggtctacctaatacaactacttcttggttagactatgtgttacttcagcaccagtgctaggtcactctactctactgagtcccctttgtgccaaaatgatgcatcttttcaatcccaagtcttttgattggttcccctggtcccctatacccctctgccacttcagtgttcatttatacccacagacctgaataggcatggcagccggtccttttcatttattcatgtatcgaaaattactatttgtttatgtgtgtcacatttttaacacaagatgaagatatataactagaatccaaattttatagtaatctcactgtatttcgaggtacaaaacatataatttctattaaaattagagctcttcatctgaagaattattctaggcaggtctctgtgggtatctgactggcttggtaaagtagagatggcagaatgccctgacctctgactatcaacttccccacatatggtttcaagatggtttgcactcaagagtcagctccgcatggcaacagactttttatcccatctcacactgaattgaactccgtcttctctatagaaactgtttgccttacagctttctttatctacattttacctccctttccttgacccaaaacatttcttggtccttgactcttccttttgtcttccatctcacagtcagactaccaggaaacccttcaaagtgcatttgatttgattgctatttccagtctctcttggaattcctgcttcaaatgggcttcacatgtccaagtgatgatggcttcctgtgaggtccagaagttattctttatacaattctgaggaaaaagcaacctaaagtgtacatgagctcatgcaatcccaccctctgtgccatgagcatgataaaaaatcagggtcctcagaaacagtttagctgctcagcttcgcctctgacccctcacctctcattcactcccactctccagtggccccaaacagacctcgtgtattcttatctaatgccactgcttcagctgttcttgggccgacttcctagcccaagaatgtcttccctggaggtcttcatggctaatggtgtttcttcctttaagggtttactcaagtcagctttgcatgagatccatcctgaccatctgtgtcaaacaccagctttcagcttttcaatcatcccattactttactctcctatcttctgccaggacacttactcctttcttacatattgtacaatttatttcttacaccttctgttgactatgcaatgattctatgggctccactgttttcaccagttcttgctaatgagttgtgttctgaagtgaaaggtggcatttccagctatagaatttaattgttcatgtccagcaccctactggggtgctcccactctcataaagttgtgatagagaaagcaagaggcatcaacaaggctgccataaggctcggatttgagagctatttagccacaccaggtaacctaaccactctgatgcaaagcctagcatcacccagctggggatatcagacttttcccagatactacacacaacagatgtccaagaatgtgctggaaacctattggccttgatataaaactatatactcacttgctttacataaagcccagaagacatagccaatgactgaagactgatagacaggagactgtaggtgggaggggactatcagctcagttgtcaattatctggatgctgattaagcctaccccccaattccctgtttctattggtgaagagaagtacctgaagttagtttggtggctcatcttaaacaagctgcctccagggctgcagtgatcagccctgtggttaagaccttcacaagagccagcttccagctttatcctcagtaggtataggtgggcctgggaagccctgtctgccccccttgatgattgtgaaacaaccaccacactctaagaatcacttcgtttaacaaatagacaaatgccagcattttttttaaatcgagagatattttaaaaatgcacctcatgttttcaaaagaatatcaaactagccatcacagtttacacatcattggagattttgattggggttatggcacattcccattttctcaggagacttctggagtactccaactgtcctggcccaccaatcacatcactcctttagttctcccagttgcccaccggtagatgataaattgtgtggccattctacttacacttgtttacctcccttatttccatatgataaacgcttatataattgtttaaggtttgggcctcaaaggtcttaatcctaaccaggtggcagccttgggaaaaagtaagcctggggaaatcggtgaggaaggcccagctctggcgactgaccataaatctttgctttccatgggaatcagtggggtataagtagtgtgtgtgggggtgaggggtggtggtggaaatgtcaggcacagagaggttgaagctagactcctctaactatcccaaagcctgaatgagttggggcccacccttagtgtccaaagcagttcaggaaaggttctcagggtgagggtttaaaatgtcaaaaatactgactgtaagagaacaggaagcatcaattcaggtgttccctcccctctacagggggaagaaaaccagaattcatctttctgataagggatcactgctaattttttttcccccagctgtctcagagccttataaagggtcaaagcatgcatttcatctgcctcactaaaacttcctgaggcccacattgctagcttgggatatctaatggttattgggaatgagtctgtggaatacttcacttcctgcctgaagaagctccactgggaacccatctctttctagagtagggaggactccctgatgtcagctatggagtataagccaggcaggtccaacagggaggatgagtcactgtccttccttccccttgtgacaacttctggttatttccaggcttttcatgactttcaacactaatactgctgaaggtgattagaatgctgatttttttttttgtccgccagactgtcctcgctggctggttcttgataaccacaagtattttcacctgcatctgtttctcctctcttcttaatgctgaatacagctggccaagctttagtacaataaaaatgtggccgaatgggtgccctgtttcatctctaagttattagataacttgactacagtttctctccaaaaccctagtttggggaacacggaagtttagggagcggcaaaaggaaacatgagggagagagttgactgcttgcctaaagtgtaaaaggcaggggacatttgtcacccccaaagcaaaagagtgggcagaatttactcgtatttattaaacattttctttatggaaatattatgctttggggggtaaataaaataccttaaactgacagtgctaacctcctgggtggcctaaattcaacctgaactctttgtaactgctgtcattggtacccacgcaaagctgtcatagaatgctcaggctgccacaggaaaatataggagcaaagtttcaacaacaaaattcatattcttacagttatgaagcataattccgaagatcaaatcctggcactctggcttctggtgagggctttttccatggcttgcagatggctaccttcagtatcttccggggtgggacaaagtggggcgggtcagggcggggcgaggcggggatagggagcaggggcagggcagaagggaagaggaaccggtgggaggaaccaatttctctctttacaaggcttgtaggcctatgggattagagcgctgccctcataaccttattagctttaattactttctgaaagcatgtcacatagtcatgcgggaagagaactctgccaaatgaatttttggaggaccacaattccctccccatcctgtgcatactcagggcccactaagctaggagcttagtacaggctgaaggacctcacaagaggagaagctgttctgtttaggtcaggccaccaggtgtgcaccaggagtggagggggcagcctgctaggaggaggggtcagtcctgcctctctggacttaccgtgaggagcactgggctttgccaagctctttagggggcagaaggaaagattcgggtgataatggagagagcagcaaaggcagacatttgggaatcggaagcatgagagatcaatgaaaaggttggtctgggacagttttcagacttcttcttgcttttctaaagtggtttttaatgcgttttcctttatgttgctgacgtgggaagttaatggaagacggctcttcatttccccggctttctggctcatcgtcacctgcctatcattgggttccaaggcatctgctctgctctatttcagccttcctcatctccccatattcaccctcttccagctcctttcccacacaccctgctcacttgacaggcagcactccacctgactgcgttaacctcccggcatctgccgtaccttgaacgtcagtctggagaggagagagttaaactcctctttaaatgtgggaaccccatcattgggtacttggtattaattttttgtctaaatttctaagttagatgtcatttcccacagagatacggacttcgatagacactcccctcctctcctttcatcttttcgggttttagtatgtagatcacattgtattaagtttaagtaatctaaaacaattacagtatacatatgtgcagaggcatgtaagtttgcatgtacaccttcacatgtatgcacaatgtgttttcttggtgattgggtgggtcgagggtcatatcaaaacagtttgcccctaattagcaggagctctggtgaccctagtgtctatgcatgctactttccatgcagatcttctcatgctcctaagacaagatgattgtatccagagtttcgtgggtttgcttctgcagactctagcacataatagcttgagaactgaagtgtaaaggcatcatttgtgtgagcctggatttaggccactgtctctgaacgtctcctaataaattatgaatatggtatctgagagtacacgattaaaccattagcaaaattgttttattgcctccgttgacaaggagatagatgtgtcatctcagggagtgtgatgtcaggaaatgtctaagcaagcagagcttaaaggaagacagttgcaaaaaggactaagacattcttgaagctcacttttgctgacatagcaatgatgctcaagaaggtttggggttctaatccatactccaccacttcctagctagggcatctgtatccaattatatagtctttctatagttttgtttcatataataatgtggaagtactagggtaccaagtcatataggtgttgggaggatgacatggagaatatgggtcacttgatttgaacatggcttgggtgtggaccccaggggttcatctgttcaaggctcagtctcctggatggtgttttaagaagtgatagaactgatggagacaagaacagtggaagatgactgagtcataggggatcagaaataggagttaagatagttctcaggagatccttagttttgtagaaaagattgttacagaaaaaaacaaaatggacccttctccttactgtggtttgctgtttttaccatgccatttttctcttccataagtactctttcttatattgccatccaccatgatgtggcataaccaagagggtccttgcccaagcctttgttgcttgggttttcaacttccaaaactgtaaacttagctaggcagtggcggcacacaccttgaatctcagcacttggagggtagagccaggtggatctttaaattctaggccagcctggtctacagagctagttccaggacagccagggctatacagagaaaccctgtctcgaaaaaccaacaaacaaacaagtgagaaacgaagaaacaaacaaacaaaaaaaaaagacccagtaaattaaacaaacctctttttttttttaataagtaacttcagcctcaagcatttcatgatcacaatagcaaagtaatgaaaaatgtgtcaaacattaggcacagagtctggataattgtaaatattcaatgaatactagtaattattatcatgcatcgatataacatcttttatcctattatactctggagatctcatttctaagacacacagaaaaggcaagaaaaataatacagaaatacccttatttttgcaacttcttatcatggttaccccttagggtacatcaattagctagtgatggatctgtgctcattaacaaaacttactgatgatagatatgttctgtatctaggcactatctcttcacatatgtctagggtgactaaggacctgggttttcattttacttaatttatggtggagggcgcccgagcctcagatgagtctgggcactgctctgctccccaacctcacccatcaacccctgctcccttctacctgaacacccccagacaagagtggacctgcccagactggaaggcccaccctgagtctggacacacctcacccttgtccacccaccgccctctgccatccggctgccgccagagcctgagacctccacctgccacctgagggatggagagaccccacctgcaaccactggaagaagggatgagaagaagacagagtaagaacgcactcaacaacagaaagaccaatatgacaccagcagaatctagggactccacaccagcaagaactgaaaagcccaacatagaggatgaagaagagatagatcttaaaaattattttatgaagatgatagagaccattaaagaggaaacaagaaaatcccttaaagaaatagaagaaaacacaagcaaaaaattacatgaaatagaggaaaagacaaaccaaaaaattcaagtaataaacaaatcccttaaagaatctaaagaaaaccaagaaaaaacaagtgaaggaaacaattcaaacagttcatggtttgaaagcataattagaaacaataaagaaaacacagaatgaggggatgctggaaatagaaaagctgggtaaatgatcaggaaccactgatggaagcataaccaatagaatacaagagatggaagagagaatctcaggtgttgaagaccattagaggatatacagtcatcgaccaaagaaaatctcaagtccaacaaatccctaacacaaaatatccaggaaatatgggacaccgtaaaaagaccaagcctaagaataataggtatagaagaaggtgaaaaaattcagctcaaaggtacagaaaacttattcaacaaaatcattgaagaaaacttctccaacctaaagaaggatatgcctatgaaagtacaagaagcttacagaacaccaaatagattggaccacaaaaagaagtcccctcaccacataataatcaaaacaccaaacttacagaataaagaaaaaatattaagagcagcaaaagaaaaaggccaagtaacatacaaaggcagacctatccaaattacacccgacttctcaatggaaactttgaaagccagaagatcatagatagatgttctacaaactctaagggaacatggttgtcagcctagactactgtatccagcaaagctttcaatcactatagatggagaaaacaagatattccatgacaaaactagatttaagcaatacatatctacaaatccagccctacagaaattaatggaaggaaaactccaatgtaatgaagataattatgctcaaaaaaccataggcaatagataatcccactttaccaaacaccaaaaaaaaaaaaaaaaaaaaaaggtcaggaaatctacacacaataacatcaccagcaacaaatccaaaacaaacaagaatcaacactcaatagtcattaatatccctcaatgtcaatggtcttaacttgcctataaaaagatacaggctaacagaatggatatgaagacagaatccatccttctgctgcatacaaaaacacatctcaacttcaaagacagatggtatctcagagtaaagggtttggaaaagattttccaatcaaatggacccaagaaacaagctggtgtagcaatcctaatatgtaacaaattagacttcaaactaaaatcaatcaaaagagatgaagaagggcatgtcatatttatcacaggaaaagtccatcaagatgaagtctcaatcctgaacatctatgccccaaatacaaaggcaccaacatttgtaaagaaacattcctaaagctcaaatcacacataaaacctcacacacttagagtaggagacttcaacaccctgctctcgccactagataagaccaccagacagaaacttaacaaagaaacaaaagaactaacagatgttattacccaattgggtttaacagatatctatagaacattccatccgaacacaaaagaatataccttcttctcagtgccatatggaaccttccctaaaactgaccacatactcagcaatgtagcaaacctacacagatagaaaaaaaatggaataagcccctgtatcttatcagaccaccatgctttaaagttagaattcaacaacaacacaaattgcagaaaccctacaaactcatggaaattaaataatgagcaattgaaccgttcctgggtcaaggaagaaataaaaaaaaagaaattaaagacttcctagaattcaatgagaatgaagacacaacatacccaaacctatgggatactttgaaagcagtgctaagaggaaagttcatagcactaaatgcccacatgaagaaactagagaatagtcacactagagaaataacagtgcaactgaaagctctagaacaacaggaagcaaacactccctggagaagtagacgccaggaaataatcaaactgagggctgaaatcaataaagtagaatctaggaaaacactacaaagactcaatgaaacaaagagttggattttcgagaaagtcaacaagatagacaaatctttatccaagctaaccaaaaggcagagagagagcatgataatcaacaaaatcagaaatgaaaagagggacataacagtggacactgaagaaatccagagaatcatcaggtcatactttgaaaacctgtactccacaaaattcgaaaaactaaaggaaatgggaaattttctggatagatatcacttaccaaaattaaatcaagaacagataagcaagttaaacacaactatagcccctagtgaaacagaagcagtcatcaaaaatctaccaaccaaaaaaagcccaggcccagatggattcactgcagaattctaccagaaattcaaaggagagctaataccagtactcttcaaattgttccacacaatggaagcagaagcaacattgccaagctctttctatgaggctataattaccttggtacccaagccacacaaagacagaacgaaaaaagggaattacagaccaatatcccccatgaacatcaatgcaaagatattccacaaaatactggcaaattgaatcaaaaaacacatcagagaaatcatccaccatgatcaagttggctttatcccaggaaagcagggatggttcaacatacaaaaatccatcaatttaatccaccatataaaccaactgaagaagataaaccacatgatcatctcactagatgctgaaaaagcttttcacaaaatccaatatcccttcatgataaagatcttggagaaatcaggaataacaggaacatacctaaacatgataaaagcaatatacagcaaaccaacagccaacatcaaactaaatggagagaaacacaaggctattcctctaaaatcaggaacaagacaaggctgtcaattctctccatatcttttcaatattgtacttgaagtcctagctagagcaataagacaacaaaaggagatcaaggggatacaaattggaaaggaagaagtcaaactttcactatttgcaaatgatatgatagtttacataagtgacccaaaatacactactggggaactactacagctgataaacaccttcagcaatgtggcaggatacaagattaactcaagaaaatcagtagccctactatatacagaagataaatgtgcggagaaggaattcagagaaacatcaccctttacaatagcaactaacaaaataaaatatcttggggtaacactaaccaaaaaaaacaagaaagacctgtatagtaagaactttgagtctttaaagaaagcaattaaagagtataccagaaaatggaaggatatcccatgctcttggatagataggatcaacatagtaaaaatggcaatcttgccaaaagcaatctacagattcaatgcaattcccatcaaaatcccaacacaattcttcacagaccttgaaagaacagtactcaacttcatatggaaaaacaaaaaacccaggatagccaaaacaaccctgtacaatagagaaacttttgggggcatcaccatccctgacttcaagctctattatagagccatcgtcctggaaacagcttggtattggcacaaaaataaataggttgagcaatggaattgaattgaaaaccctgatatgaacccacacacctattaaaatctgatttttgacaaaaaagctaatgttatacaatggaaaaaagaaggcatcttcaacaaatggtgctggcataactggattcagacatgtagaagattgtagattgatccatatctactgccatgcactaaacttaaatccaaatggatcaaagacctcaacataaatgcagccatactgaacctcctagaagagaaggtaggtagcacccttgagcaaattggtacaggacgccactttctgaacataacaccagtagttcaaacattgagattgacaattaataaatgggacctcctgaaactgagaagcttctgtaaagcacaggacacagtcagcaagataaaatgccagcccacaaaatgggaaaagatattcaccaaccccatatctaatagagggctgatcaccaaaatatacaatgaactcaagaagttagccaccaaaacaccaaacaatgcaattaaaagttgaagtgcagaactaattagaaacttctcaccagaggaattcaaaatggctgaaagacacttgagaaagtgttcaacatccttggccatcagggaaatgcaactcaaaaccactctgagataccttcttactcctgtcagactagctaaaatgacaatctatgctggagaggatgtggagaaagaggaactctcctccattgctggtgggagtgcaaacttgtaagaccactttggaaatcagtatggcggtttctcaggaaaatgagaatcagtctacctcaagacccagcaatctctctcttggaaatatacccaaagaatgcacactcatacaataaggacttatgttcaactatgttcatagcagcattatttgtaatagccagaacctggaaacaacctagatgcccctcaattgaagaattgatagagaaaatgtggtatatttacacaatggaatactactcagcagaaaagaacaatggaatcttgaaattcgcaggcaaatggatggaactagaagaaaccatcatcagtgaggtaacccaatcacaaaaagataaatatggtatgtactcactcattcttgatttttagacatagagaaaacgatcactagcctacattccacactgccagaggagctaagaaataaggaggaccccaagagaagattgtaagtcccttgaagaaggggatggggacaagaactcctgaccaaattggagcccaggggcagggagaggaaggagagtcttcatccagttgctgttcgaagcagaaacagacactcatagctaaaaaatgaaccatactactggaattcagttgtggagagggaggagggttgatcaaaggagccaagacggggatggagagacctgtagaaatagtggacctgacctattgatagaatggagaccctagtcataaaactggggaaaaagcattggaccaaaccaaatcttctgaatgtgggtaccaactaggagcccaagacagtctatagatcctctaacagcagagccagtctttatccctaagcacaaatggacttcgggagcccattccctatggagatactattgcagcccagataaagcaaggagggtctagaccctcccccaaacaatatgacagactttgtaggtccttggcagagggtctcactatccctggagaggagtcgaggggtgggttgtggtgggttgggcggggaacatgtgaggaggggagggtgagggaatgggggtgatggatatgtaaatatgagtaattaaaaataataaaatggaaaaatattaatttacattaaatacaggaatcagaacaagcataactaatgtccctcagaacattcttgagtacagcagtatcatttacttattaaattgaaatgcatgaatataaattggtacaatgatgatgatacagtcagagcaacaacaacataaataaagcaaatagataatcttaaaagacaaaatggcacccaaactcaagccagatactggatccagtaatcaatccaagaaagtaagatgcattctatccttttatctggttgtccaagataattgtggatttgtgtaaatttgtactttctgctgaattttggacaactcccagcagatgcaacttctatatgacctatttgttgcagactaaaacacacagcactccaaaggtaagaacagaggcatagacaggagattggtccagaggctcttacgccagctagcctggagtatggagcacagcagtagaaacaggagagatcctcactcaacaaggtagaaggcaaaaaccaacttcaaaaagttgtcctctgactgatgcattcacacacatagacacacacacacacacacacacacacacacacacacacacacacacacatagacacacacagacacacatagacacacacacacacacacacacacacacacacacacattctaagaaaaagaaaactgctcaatatgtcaatatggagtttctgacatcaagtactcttgtctatgaactcttttcctgaaccagttattggagtagtcattatatgctttgtgcatgaatattttggtaggcagtttctaaagtcatctgataatctatcaaacacaaatctaggcagttctgtctgtgaaggaattttgtttatgaaataccaccagtttctcatgtgcttcccaccagctctaaaactgtaaaaaagcccctaactaaatgctttcctttataagagttgccttggtcagtcaggcattgtggcacttgtcttttatttcagcacttgggaggcagaggtatacagatagatatctgtgagtttgaggccagcctggtctacacagagtgttctaggacagccagctctagatacagagaccctgtctcaaaatatcaataaataatcatatataataaaatacatagataaataaagaattgcattggctatgatatctctccacagcaatagaacagcaactaaggtcatactttaaccatacaacctgaaaaaaattaaatttgcaacaacctaaagtaattgagttgagtcttttcctacttgaacctctaacttgattctctgcttcatcccctggaagaggaagtagctatcccattccttgatatgatttcctttttccttatgatagattgaacccagggcctcatgccacctatgcagttgccctacttctgctagctttgagctagcccagacagaatccaatcacgcaagacttccttcttataaaactttgaggcagttagttgaccttgttttaaatgtctaaattcctaaatttatgatttttggatccatgatgctgagacatatgtgctatgtatgtaatgaaactgaatgttttaaaaggtagtattatttggaaaagaagtccctcttgattttttatagaatacctaagcttctatctataacataaatgagaagtgacagctcttatcttccaaggggcaaatggaaggaggaacagcatttttgaccctctcaacatatcgccaaggactacagaaatgcacagctctctcactccatctctttcagtttgttgcaaatgccctgtgcaacaaccgccatcctactcccaccccatcaccccatcatgggcttagctaagattcgagaagacactgaaggaatcctcagcttggtcaacagcaatccccaaaggtttacagctgtgaagagctttcttccttgttgcagctgctgaattttccttttccttagctcgtccatattattctggggacaggggtagccactctttgccctttcttaacatggagcagtaatctttctttatatattcctcaagctaaatccatgtgactgttttgactagttacttggacatttaaccagattctaccttctaatatctttcaaagaaaaccagaccatgtctctaggcttcatgaaaatcacatctaatgaaaacacagcagtctgcatatatcctaaagaaattattgacagatgtctatgtctctctttgtgtgggaagtcatgtgcatttttcatgatgatagaagtgataaaccctaactttggttaagcacttacttatgtgtccagccctacataggcattttatgtgtcctaatttgctcaattgtaaaagtctttctctgagaaaggtattataatttccaacctcatgccttttgtgcaataaatgagtggctatttaaataactggctccaaacacatagttaataaggggaggagttcacatctcagaaaattgtgatctccaggttgtgtaatttgctgcttatactctgaaatgagacacactttgtcatcacttacaaagtgcactgttcagcagaagaggaagggcccttctgacacaacaaattatctctgctcggagaagcaaatacacgaatactagaaaagcattcccccttttcttgccatagctattggcagtaaatatgagaaatgagtgaatctgctttcaaagttctgcctgaagctgagaaaatttcaatgaagtcccataagacagagagcacagtttaaggagtttgtaacaagacagaagctttttgttcaacttgtgagataaacaggacttggaaggtgattgcctggaaccttgttccttcctaagccccattactgaatgttagagttgaaacagggcagcaaaacctctcttgatcctgggctatgtgttactctcagtaacgaatttacactgtgtgttcacataggtgcatatggctaaagtatacaagaggcatttttttttctccacagaaaaacagattatacagctattcagttttcgtatcattgctccaaatggtttttgaaaacaaccagcaccattgtcaggctactgacattgtgtgtttcagaggcttgcatatcctgatgctctgccaatcaaaatgtgtcctgaataatgtagaaagagtatccagtatagaggattctcagtgaacctatgctaaagtaaatagctactttgaagggtctattttgaagataaatacatgcttcattggatttaaattaagagcccaaatacaaggttcttcatctcttacctaagtatggtgatagctaatagctttctctgtctttgcaccttcattctcttccactcccaagttcatttagaatatttcccacagaggctcttaatctagatacatgatggaattttatggtccttaaatgtagatgagaatcatttatttatttaccagtttttaactgaagcttaccattttcttctgtcacaaatggagacaaactttagtactatatgcacttgctgctgaacaaaaatcacagatgtttctctgtctcattacagtgctagcgaatatcctcaaatgcatttgtgcccatcatcaacccaaattatgatggttattggacttgctgctagatctagtttttaatgagttagtaaagaagcaaatgtttattacaggcttattttctgatttcgacaactgtatttctaaatagttggtctcctttgaaatcttatttatgtgtttttatttcacctagagaaggaagccaccattaggctttctagattgctaaagatacttacgatacccacacccaaattagaacccttgatctaaaaggtttttctttttcttctaaaattaggtgtacaacagcactttccagtagaagttttcacattggtggacattatctgtacctgtctggttccatacagccactgctagtcacatatggatgtggaacacttgacatgtgaccagcatgatagaggaagtgaaattttaactgaatttaattcacttagctgcaataacgaagatgagtaccatattgagagtgcagttctagaaggtatgtagtagacatgactaataaatggctaacaatgactaagaaatcaccagatagtttaaataacagaaatctattacttaaagtgccagtgtgatatcccacgggggacagagccatgggtcagcggatattcattgaacaggtgacatttgagctgagacctgaaggttaagaaatatcctgctgtagggagaaattaaggaagatcatctgctggatgtgtgagactgaaggctcagctacctagagcgctgggggaagcagctgcagtagggcagggagacaggggagagctggggccagattgccactgctcagtcaatgaatataaagattttgaactatttttatccagctgtagtaggatgacactagagggcttttaaatgagacagcctgactttatcaaaatttcctaaaactcattggtcatttgaactgtaggaggcacagcttacagaaagccttagaggaaccacaattattaaacatctggctgggcggtggtagcatacacctttaatcccaacacttgggaggcagaggcagggggatctctgtgagtttgaggccagcctggtctacaagagctagttccaggacagcctccaaagccacagagaaaccctgtctcaaaactgccccccccaaaaccccaaaccaaaacaaaacaaaaaacatctggtctttttttcttcaaaaaaaaaatgacacccgttcactaggaaggctggagtggatgttgtctaataaccccatgattctttgctattctatggagtcagcctgaattcccccaaatcctgagcactgcttaggttctaaccctgagctttgtctctcagtgaatacaacccatccctatgaaagaggttccatgtactttgcatcccccatcaatagaatctaaccttactcttatacaaatccttcctctggagatacttaccctgagctatgcttatcagtcaaaagaactcattcttactgtaaagtcagaagtgctttgctactttgcaagggagtttcaacgtagctattcttgaagtttgttgtgataattgtcacatggcaactttcccctaaagttgtactgtgcttagatgcataagaaaaaataaactatgatgtcagactttgcaagttttgacccagaacctgctaaattggtgcttaactgagtctcattcttcactccacaatgatggttttactgctgtccgtgatgcttgcagggacccctaacattgaataatgggttgtaggatggaggctggggtccagttggaataattataggagtcccagtgtgagctggatggctcatggtgatagtaatgactaggatctatagatagtctagacaaaatgagcaacatcttctaaggggttgttggggattgcaagaaagataggaataaatattaaagactaatgccactgaccaagataatattgggatgggcaatccagggcgaaaaactggcagttcagctgtagatatccaaatggagatgcaagcttagaattgtgaacaaagggaggatgaagaattagaattcgagagttgcagcagaaatggctttacaagatattgggtggaggccatctgtcaccaacacaggctggcagagcaggaactcaggagtggttggatatggccagcatctaagtaggctgcttgtcccctgcagatgaaattcattctctacttcatgcaacatgaacaaattccaagatcaccaacgaccaacaaattcggtcgctggtgatccagcgtacacactgctagagagtacgctgtttgcaaaacaacacaaatgggtagagtcaggaagagagaaaaaccaagagctattaatgaattccagattcacccataaactccaaaatacataccagagcaactgttccacagggaacaacactggaatgtaaacacagtcaagcagacccaggttaaaatcctgacatcaatattggctcttattattacccttggacacagtaagacttaagcctataaggcataaagcctgatacctaacacagaagacatactcaaaacacaccagctctttacacaaaatacctggttcagtgttagtgaacagtcgctgtgccataggcttaagcaatgtacctaaggtgttacaagaggaaagcctgtgatcatgcacagcattgactcctggctcgagaactacctgagttgggctctgttccttacttctcacctatgtttctcacaaataatttacatttcagtgactttccaaaaactggatacaggactcccttgcttcctaggactgtcttctgctctctggcaggaaaatgtacaggtgtctacatttttcctttcaaataagtataggttccaggggaattttccctctttgttattttcccctttcctcttctcagcccaccttagtccctccagaaaacttcaccagcttactcagcatccagggctgaagcattgctacctccacaacctaccattacacatgtatattagctaaagtcctgctgagtcggctttctctgtgcatcctatgtaataaacctccagccactttgcatggaagacacaaagaaatggtagacaatttatttatcccagcagatcaataggaaacctggagcccttccagggaaaagtgtctttaaacctcccctcatttcctggagtgtgtgttctccatctctgtttattatgtacaccggtgattcatgcacccagtgggaacacttcagatgagcaatcaccatggcacaagggcactttgcagaaatcacagtaaacaggcttacatgatacacactctcctctctttcttcctctacatctcaccctcccttttttctctctcttccttttcctccctctctcacctttttctccttcctcacctccctccctctatccctctttctttctttatcattttcctgccttatacttggttggtaattagcctgactctctatagtacagttcacaacacatgggtgctattatgtttaaagtcagcatttcctaaggttagaggccctactttcttaactgtcctcaccgggtgcatttattcagggacacacgaaaactagcaacttaagttttctctagaccagatgagaagtgggagagaggtggctcattctctgcttttagctcatggctctcctaaaagtgtgtatgttacatgatggctatatgtattggactttatcaacttggactccaaatggaaagatattggatctatttatttctctccattggtagatgcttaatgtaatgcctataggtgtctagagacatttttatacaagtctatcaggtacttggccatattcactatcactcttctttttctctcctttcccatcattctatttaatctgtcttggtatcttctttctaccttcataccccatatacatgtatgattccatgcatctacataaacactaggatccaaaaatgtgagaaaacatgcaatatttatttgattggtgtctgacttatttcccttattatggtatctctggttgtatctattttcctaaaaatgatataatttcattctttgtggctgaatagaattccattgtaaccatgctgttgcttaaattcatttttctgttgataaacaccaaggctgatttaatgatgtggctgttgtaaatagtatcggaataagtatggttgtgcaaggattactgtggtgtgctgacttggagtctttggggtatatacccaagagtggtatacatagctagatagatccttttatctcttgttttccatttgtcacccttacacagcttgtgccattgaaacaattaccaaaactatctgttaggatattttgaccttttttcttcattaatctgtgacagaatctaacgaagagtgagatgttgcttgcctgtttcttcacaatgtcaccatcacagccatttgttttaattagctatgtcagaggtgcctagcatctttccagatgtgtggggtagatgatggatggacatagcatgccaggatcttagaaagtaattgttcaaaaaataaagcccagaaaaacctaacagtggtcttctctatacacacagatgcacaagcatgcatagtcacataactgttggctcaagttcacttggctatcatattttgacatcctaactttggtccttaattgccgtcatttctggtcacttttctctctgcaattccctggatccattagctctatgtgtcattttactgtaatgcaaatgcatttttcaaattggctgaggcttgtttttcccagtggatggagaactgcttaaaggcaattactgcttcttctctatttctataatcacagaatctagagcttcacccattgaaggcacagcactgttgaattaatcaaaggcccttctgaaccttttcaggcccttgtgatttgtgagtgactgatgattttctccctcaagaaaacccaggaccagaattctgcatgttattttaaggaatgaataactttgatctacacacattaactcaccatgctcagtctagtagaaggccaggacttggatgatataatacatggactcaattctgcacctggcagtcccaagttagctgataaaatgttccactcaccttttaacgacaccaaaagacctgctctatcacatacaaggctaaaaaagatccaaagtcaagccaaatgaagaagatactcagggtcatttgtttacttctgatgaatcaaacaaactatcatgctaaacatatggtccccatttacattcacacccatggatgtggcactcagattatatccaagaccaacagggatcactggctgaaacataatgccaagtctttataaatgttcattttggggttttcttttcattttttaaagatatcatcatcatttttttgtccgtgttccctgtgtatgcctggtgtccctggatattcctgaagttatagatggttgttagccatcatttgggtactgggacctaaactcacatcttctgcaagagcatcaagtgctcataaccactgagcagtatctacaatcccttcttttcactttttaacatttgtttttttccaattatttaatgtgcaggcatgtgtatcatgtaggtgcctgaatgtctatggaggtcagaacaaggcatcaaattgcctgggattagagttacagatatttttgagtcaccatgaagatactggtaactgaatataggtcctctagaagactagccagtaatctgaagaattgagctacctctcctgccttgttatctttttaacaatagattctactcacattgtattctgttgagttttttaaatgatctagctcaattgttcccagaattttagcaactgtctagaatttttcaaaattactggcaacatggattaatgtttcttctctttgggttctggaaatttttagaaggtctgtgctgtggattattcctttacactgtgtaaatatatgtcattgtgattggtttactaaaggagctgactggctaatagctgaacaagataaagttaggcaggacagccagactaggaaaatggtggcaggaagaagggcagagtctggagttgccatccagatgcaaagggtacagggaatgaatgtgccaggctaacaaaggtactacacacgtggtagagcataaataaggaatatgggttgacttaaaatgcaagagctagttagtaataagctgagctattggccgaacatttataattaatatacacctcagtgtgtttatttgagagtgactatgggacagggacactgcctgcagtttgtcactctttatcataagtaacaaacttcaaatcacacccaaatatccctttaatagggaaatttgacctctgcttcttctatgggttgtatgggagcttgtgtggctggtctaactcagcatattatctctaatacgctgtgagccatggtttggtatgctagaatggtttggtggtggtgtctttgaggactgatagacaatatgcctttccaataaaagaactcaaatttactcctgactctagcacagttcctatctgatgtctaaagccagagatcttcatggctcatgctatagttaatttgatagatacccaatgggtttctgtaagacatttcaccagttttcatctctgggagactgtaacccacagagtaacacaaaataccttggccatatgtcttcaagactgttcctgttgttttgggttagaaaaaccatttcattttctttccttttttttcttttgatttttcaagacagggtttctctgtgtagctctggctctcctggaactggatgcatactctatatactttgctctaatggaatcttttccataccagacatgttctcttttatgagccattatttgtatcactttcactatcgtttaatgatcctgttttcagagcaattctagattcatgcaaagctgagaaggggcagagattgcccatatgtatcctgttcctagacacacacggcctactccatgagctacatctcccactacagtgaacactttcgacatcttctgaatctcacacaagtcctcagttttccctagggcttgctgttggtgtttgcattttacatggtctgtgttgaaattcatatcaaccactacagctaaccatacaggaccacttcaatgccctaaaaattctcgcctctgccctttcctttcccagcaccaccttacagttctttccttctcagcctctgactgtttacttgcctatataagcccattccttaccattggacttaagagtctagctagcactctgacacacatgttttcactactatagcttagaggttctacaattgactattttacctttatttggcaatgctttccttttcttcttagccaacctctgcaagtctatgcagtatgttcaccatttccatataaactgtggtttattatcacacccttgtgtatataaagaatggtactggtggccaaagagatctatccagtatgctctagcaaagccccttatttgtggcagtcatttcccttaggcttctggtcctgttcaatctcacttcaagatgaattttctattttccttcaattttagcttacactcagggaagaagaagaataagaagaagaagaagaagaagaagaagaagaagaagaagaagaagaagaagaagaagaagaagaagaagaagaagaggaggaggaggaggaggaggaggaggaggaggaggaggaggaagagaatctgcccgccccagcagagcctcactagaaaacaagaattatgaaggtggagacctgataattggctgtccctcacacttgaaatagattgctggtgtgctgtcccttgaattaattgctgcaagttgctgaatagagttgtcagtggacaccaacattctctttccaaattctccaggcaatagctcattcctgagtttagcatcctaagactttagtaggacaggacactcattctttcttctgaaaatgatcagaaatgacaggcagtagtagtattgccctaggtgaatctatggttctcaaatgcaagagagtaaagagttcagtaggtaacctgaggggaagttaaagactggaaaccccatgtaattatctctcccataatgaggcttcttgagaacacttggctggcacgagtcatatcatgggctcgggaagctttaattgcccgttattttcagcatgatgacattttaaggttttgttccctaacagaagaatggataaatacagcaattgactcatgtgttgatccagggctatttttacccttcagcaccttccattgtcattccagaagaaggtgcaacagtttctgggcagtcctcccacagaagacctaatatatccacacgcatgcatgcattgccttggctctcaggagcatgtagacctctttgcaggatgccgctgcaggagtcagtgtgaggcagtgggaggttgggggttgggggacactgcagcgtgcaggccattttcaaagtcagactcctctccacaggcagaggccatgccaaggctttatcatatactgaaagcctggtgtttcagatctcatttatcccaagaaagctgtcagggatggcccctgcagggagggctgacccaaattgtgacttctttcaggcctggcaagcccctctaggacaaacaggaagcgatcactcagcataatgtattctcactgggaacaagaaaacagtccactgttcagttcaaagcaatgaatccaaggccgtaagttggttttggctcaactcaaccctaaaatcaagtcaaatggaatgagtttattaattcagagcctggagatttgatttggctgaatattccagttgaagtgttgaattccaccttgtgttagttactgttttttccttagccattttgaaggactgcttggctttccaaagaaaatgccattgttggtttcagatccattcccaggtacagaagtaatctcccaacatacggtttcaagtgaaagatgggttttaaagtaaaaacacagtagaatgaaaattttctttctctcattgggagctagagaaattcagatttttcttgtataatttatttgcctctccttgggctgctaacactcaaacttacctagtctaattacctttgcagccaattaaacagggttttccacttaaataacggtacctgccaacacaaagcagcagctcctgcctttgaattccttaaataagatgcttaggtgctgtgtagaggtatcgagaagccaacaagaaaatgtgtatatgctttctagtggacagggttgtttcactagagaagtgaggtgtggtagttctgctatttttcattagtgttcacagagcaaacacattcttagaatcaggataagtggctctttcttccaactcatcactcttgccaggtgtatagaaggaatggataggctgatgcatttgcttctatagacacaatggcagctggacagtcaaatgcttttccttattgcaaacacttcaagaaatttggcgtataaagggataattttagaacacacaggcctagatttcctcagttctccctaattgctttgcattgtgacaggtgtcatgctggtgtggaagaggcttaaatggtgtttcgtggaaaggtgacttcgtaaactctgactattactatttttagaatccaatgccagtttcagtcctctctagtcttggggacaagagtccaggctgggctaggtgttgtggattttgaattctagcatctactcagaagtaagccccatgtctggactgtgtctgtctgtagccaatacagtagtcatgtgccttctgacagagtttatgaatgctgggtaattaataaatagagaggcaaagaaagaggtacacccctatctgtttccccctgggttcttacatgtatgttctttctactcagggtatcaagtaagcattagtgagattgtgcatagtggtacatgttatcccactactgtcagcatgggttgggggagagggaatcctaaggcaggaggttcatgacttagaatacaacctgggctatgttgtgagagtctatctccaaaagaacctaaaaataagtatctgatgcattctgctcaaaaatgctgagatagactttatttatttatttgtttatttacttatttataaatggggtcttgctgcacagtactgcttgtcctcaaacatacagcccacttacctctacctgcaccatcacatttggttcctgagtttacttcttaatgtcttggagccacacataatctttaaggacagtggccaggatcaacacagccattgtcaaaaacaaaacactttattcaaccagccttcccttagaaatagtttaggcttaagaaaaaaaaataaccattctgaaggtgaagccaaagaataaagtttctaactgaagaatgatgtcaggatgatggcgttggtggtggacctcttgtgtccagacagctgaactgctttctcgcaaaggaggcaatttgaaacatgtaacacagggtgtgtggcgatagttacttggactttagtttgtttgctgcttagctggcagacagagatatatgtgaatgatcagggtgctactgggacttttttctttctttttaaaaaataaatctaaggaacagagacaacagtccgcaggtgcagcaccaggcaggtactgggtcttgggtgcccccttgtggttaacacactaacacagaggactctgggatctgaagagtgtagacttagtctctggtcttgcttcttgctgtgcatcatcctgagctttctatctttcagcaacacagccctccttttagttctcaaatgcgccatgatgccttcttgtgtctgttcttgcttacctctttccacatcattgtagtattctttcattcacttcctgcacctaattaactaattcatccaccagtgtttccattgacttcacttctgcatggaagaattcaatgattctatacactaggccaatgttgtgtgttcaatgcagagacatcatcaagaggtacactacttatcttgactgcacttggagaccttggtctcagggcttgacccttgaaatggaatggcagtctctagaactccatctaacaacataatgtttctttgcaatgagagctctcagaagaaaagagcagctttttgaacaaacaacacaactattccacatggacatcactaaacttcatccaggacactaatcatgttttcccatgacccctttcttctgtatatctgttctctagaaactgaactaggttcttttgtcttcttgaacaactaaagtataacagatgggtaatacatgtttattcagttatggtgactaatgcactccttaaaaaattcattattaaaatatgaatcctagtcctgaagagtaacaaatacatccttctcgaacattccatttgtctcccaactttttatttgaataaaactaagtctgcaaaataactgaatcaaagccacggtgagcacccaagtgccttctactcagtcctctccctacagctaccccttatcctcttcaagggtttgggtgttagctttagataccaatgtactttatttccagacagttggacagatacttcttaaaaacatagcattttcctatacaaccacatcattaacctcacatgaagagaaatatgatgtcagctcatagtcaagttttcaaaaatatgcctttaatcattcttgttgttgtttgattcagtacacaatcaaacatggaggtgcctttgtttgtgggtggctcagtctctttaagcaagccccctgtgtttgctgttctgtctgtctcatcttcattgcctggacacttatgagttgtcctgtctatcaaatctattccttagcttttcaatctgactttttttttgtttttgcagatttattttattgaactccttgaactatctttcccccacttaacagggtgtcatgaggaccactccatagcaggtcaagtgtattttctctttctttacatatctttgggttctttgttccttactgtgtgaagtttgtgtagttatttttctgtggatagacagtgggatgtttctagaattttactatgaataatggtataaattgtgtgtgtgtgtgtgtgtgtgtgtgtgtgtgtgtgtgcacatgcgtcactgtgtagtcctggctggaggctagaacttgcattgtggagcagcaggatggctttgaactcacagagatctacctgcctatacatccagggtgctgggataaaggcacatgtcattattcctggtccacaataagtgtttttgtgtctatgatattttgtacttgttaagatgtattttacagggcaaaaatctagaatttagaataatggattaacatgtaaatggttatgagttttaattagagactgataattgccttccacgggattgctcatcagcaacgtaggacattgacaaagtctttggtcttcctatctccccaccccttttcagttcttccttccccatctcttccgcttcccctgaattagagaagggtacatctaagtgagaagagaagtcatgttgagaagggaattctttcatcctttttatgttaaaccaagtgtcagtgtctaattttattaaatgcttttctcctctagagatatatggctttttccttagataaattgctatagcaaatttactagtgaatataaaatccttgaaattttaaaatgggttttccctttgcaatgatttttctatgtgagcccaggctgccccttcctttttgggacacctttataacaattagtttcattgcatacttgcttcaggaggacactttggaagattttattgttgttttatttctgtgcttgtgaaacaatttaagtatatttggaatgatgaagccatggaagttttggtagaatttactttgtgctttgatacctaaatacattttatgcaaattagtttgtttaagctttctttctcataagcctaaatttactgaattgtctttacttaggaaattgcttatttaagttagattttctaatttattttcacagaataggacaaaggaccctaaatgagttttcaatttcctcccttttatgacatttccctattgtcactttttattctatggatttataaattttcccatgtattcacacactatctcctttcaattatcttttgtaatgtttttcatatgatgagtttttttaaagaagaagtattttctcttattttttattctactgctttgtatttgactacacaaatgtctgcttttgtggctatttctttcttctttcatttggcttggttgttttcctccttatggatttctttgggatatgaattctacattaattaataacagtttgttgatcccatgtttctgaaacttaaaattaatcaactgaagagaggggagtaaacattgggtctttttataagatacccctggccttaaaactgaaatcctacccccatcctgagagctgggggttacaaacatgtatcatcatggctgcttccatttcttaatctttagctttcaaaactcaattttgggtgtattttacacatgcagtattgatttgagttttacatcatgatctgatcttaaaattgttcaatttcttataattaggcttaatccacttatgtttatttatacaaatgacatgttttgcctcaatccaatccaattattttatatatactggtatatttgttatgattgctatgttttcagattttttctcttcataacaaaaaacctgttgaaaataattaatggtttaagttaaacctctctggtccattgagtgcctagcccatttttattaggataactttggctagacaactgaaaacacagaactaatgtaggagttgcctaaatgaatactatcgttttgtttctttctttctttctttcttttttttcttacatttttttgtatttaaaaaaatacaaaaacaaactgttttaagcctaattcttcttcacagctgatctatggctggaatgctgatagactcacatggcacacaggccagccctactttagttagtgctgttagatggttcttctgatgactgctcatgaaaccccaggaactgagagccatctctttgctttgccagccactcaggagagcctgcccaacctctacagctataggtagacctgctgtagagtcttagacagtaaaaaaaaaaacaccaatatagtcatcattctattcagggattgagataattgcagacattcctagtcatagaaattggggacaagagagggcacacaccaagtgggaatcagccattgccttgagttgtgctatgcacaaggggtggtattatatttcagtaatagttgtaaactgctatgggaactcagaaaagaaatatctgggtttggtaccatttaaagagtgacttcttcaccaggaaactttgaacttcacctttaaagtctctcacatgtgttctgtattttcaattgctaatacaaagcttttcttgtaaaagcagactaagcagaaagagaatcaatgagccagacacatttaatttcattcttgaaaggctgtgaacagatttttgtttcaaatgaatattcacatttcatagagagcatggtcagtttcttagagagtgtttcctttagcttgacaagagttaatcatgaatgagacaaagagtttttgaagctatcaccacacatgagcacattacatatctcagtaagagtctgtgtgtacatgtgtttgcctgtgtacatgcacatgtatcttcaaatgttcaggtgagtgactttaagccactgcttgctgttcagccatcctgaatgtccacctctcaaacaatattcatctttccaaaagaaaacaatatacccagtttttcctgacaccatcttcactgctaatgcctgacaaccaccattctacttttagtgtctgtgaatttaattacactaagtgcctcgtattggtagaaccactcaacatctgtctgtgtatgcttatttcattcagtgtgtctgtacatgttgcagcgtgtgtcagaattcctgttctttttaagacaatattatatcccattgtatgcatatgctttttcatgtccattctgctgaacagggacatttggattgccgccatttgggaactattgtgaataatgtaactatggacaaaagtgtacaaatcctttgagtgagtaacatgaagtaggattggtgggtcattgtaggagaaacttcggccagcctacccaagcagcagttgccctgcccccagtgcccaggccagccctcatgcgtatgcgcatgtgcagcaggcatttcgtccctgagccaagctgccaagcctgccacaatgcccagagaccgctaatggacagacatctgacccagagacaccagtgaggaaaggacatgcagcagagtcagccacctgagccaattggaccttgggagggggtataaaggcaggccctacttccttaataaataagtctgcagcatgctctgctacttactgactcccagttcctgagtagttggtgctgtgtcttctcaccccccccccaggggtgtccgagcagtgtaacccgcaacaggtcatattgtatacaacatacaatgtatactatgtattatatagtctctataatatctatggtgattttcacttttaaagaacttgcatatttctccacatttgctgcaccttcttgagtttacaccagcaatgtacaagaacaaccatttccctactgactcaccacacttaaacatctgatttttgtctttgtatttatattacagcactaagttataatgatgaagctcacattcaactacctggccaggcattgagtcctctgtgctgtattatgtcatatgttctcaccaataattgacattcactttgcatataaggctgtgtgactttctcctttctatttttgctttcctaggttatttcatctccttagttaaactgcttataagaaaggagagaaaactcagatacaatactagccagacatggtgacagatacttataatccctgcatttgccatgagtttgaggatagcctggaatgcatattgagttctatgttaagctgagactaagagtaagatcctatctcgaaacaaccacaagagccacaagacaagaaagaaaaggacagagggcaaacagagaataatactatgaggaaatatttaaccaaatgtaaaattatttacaaaaaatatatgaggtttagtgctagagagatggcctagtgtttaagagcacttgttgcccctgcagaggacccaggatccattcccagaaactacatggtggctcacaaccgtctttaactccaattccaggggatctgacatcctcttctggcttccataggccccaggtatgcatatggtaaaaagaaacacaagcaggcaaaacactcatatacataaagtaaacacatctttaaaaatcctaaaatataaatgggcaaaaacaaaagtccaagactgccatgctgagttacagaagacaatcaagtacttgagtaaaaactaaaattataaaaaaaacatatgattgatacaaagatacaattttaaaatgagatgaagaatatatgccatgaaaacaaaacaaagaaagatgtgctgatatcagataaaaacttaaaaaaataaagataagaaattatttcataatgacaaaaggccaggctgaataagacaactatgtgcatgcatatgtaatcataagagcttaacattcaccatgtgaatattgatgaatccaataaaatacatatataacaatagatataatagcataaaccctagagctcttttctcaagaatgatggaataaatggggaaaatatcaccaaagatacaaagaataagtaatggcattgattcaactgatatgtctggaaatccatcctcaacaaatgttgaacatacatttctttccaagtataagaaaagaaaaatatgtgtttaaagtttggaccatagaaaaagtctacagaaatttcatgcaatgaattcatgaagactattattttgctgatcaaatattcagtgttttaacaaaaaaggaaagacaaaagatagattgactttagtagcccaagaccttccatatcatagcagaaagcaaacacaaaacataaaattgatcaactaagaggtagtaatctacacatatttaggggcaacagtaggtattagagattggaatgatgatgctgagtggtagaggatgttgtattccttttcttttttcacctgtggtgtgtgtgcacatctgtaatgcatgtgcttatgtgcatactgacagaagtcacaggaagacagtaggagtcttctctatccctttcctccttagtgtttaaaacagagtctctcactgaacctggagctcacttgttatctagactgactagccagtatgcaaccatagtcttcctttgtctgcatcccagttctgggacgacacccctccacacccccccaacacaacacgcttaatatgtggatactaggtccttaggctttcacaagaagcagcttacccactgagccatctctattgcccagaaattttgcttttcctttaaagtaaaaatcatgaggccataaaaacatgggttccaaagcagcaaaggtaaaatgtaaagaaagtgagagtaatcactctatgaactgtcaggtcttgctgaacagctgtgttcactaaggaacatggaagggagggcaacactcagcacagcacagaaaactcagacactgaaccacataatattacaactcatagcccaggttagccttcaacttgcaatcttagcccaagttaggtttgaacttgcaactttcaggcctcaatcctccaagtactgagatttaagccatgtatcaccatgcatgatttttctgaaaggtacaaatgaaacccatttgaggaatgatgacagtttttacatgcaatgcaactatgatgacacaatatccataagccaaatgaataaacaagtgaaagtcaccctatgactcaccttcgagcaaaatattaatgcaaaaaatcatacataaaatagaaaaatgattatttgacacttgtcaaataacacatttttgctaaaaaatatccttctaataatatgaaaagcaagctataaatagtgaaaataagtatgggccacttgtctgtcaaagaactattccttaaattatataaataactctaaacctcactggtaatagtaaagcatctattcagaaaaccaccatgagacacatacactttacctaagacgtaaagagagatggtgattaaatgatgttctgcagtgttggccaccagaagaaaaatacaagttaaatcacagaaagctatctaggaataagaccaaaagtagtaaaaaaacaaaaaacaaaaaacaaaaaacccacaatgccagcaaaaatcaggagaaacctgtgtcacctgatgacatcagatgacagcccctctggaaaatcactcagcagtttctcatagaactaaacattaatcaatgtgtaacttagccaatgcatgtctggcctgctttccaagataaattaaatcttacattcttacagaaatctgtgtttgaatgtgcataggaatattattaggccataggacagaaaacacagagtcctttggtgggtaaattgttgaaccaactatggaattactactcaacaataaaaaggagtggagttttgacacttgaaacaattttgaagtctcccctggaattatttccaaggaatagtgctaagtacaaaagctaatccaaaaagttatgatctatactacttcatttatgtttaacattttgaaagaaactattttagaaatggggaaaagctttgtaagttgtctagggttacaggcagaggagggaacataaaggaaagagatgctacggctgtaaagaggaacacaagggtttcttatgggaataaattcttccatcatatgactgtaatatagaaatacaaacacacacatcacatggtcgtgaaccaagccaccccacagcactgcttaacctagggaactctcaaactggtcttaaatatactgtgattttctaaaatgttaaaatctagggaaaaccagttcaacggggacattgcatacatctttactgtttcttgccattgcatgtgaaatttgtatttggctcaaaataaagttttaattgattaattatttaagcaaaaattatcctcatatattcaacaaaagattttgtacataggtgtattagggcagagcagctgaatgccaagaaccgagttattaggttctagaaagaaagactagtagactcaatggcatctggaaagtagggggagtggttggtagaatgaactggggacttcatcaaaggagacacagcttccacatcagcagggatgacaacagagaggccctgacttggtgtctcctgaacagactgtatcataacctctaaatagacagtaaagtgtaactgttacaagtgtgacttctgaaactgacttcctgggactcaacatctgtcatcagcaggataaaactttttctgtgcttaggcttctccattcaaggtaattcacactcagaatggagcctggcatttcgtcagtgatcgctaactgcattagctcatagaagaacatttgtcatgtgtgacaatataagggttgttattttttcttattatttgttgccttttggtgattcattttcagatttcatccaactctacctggaagaactgtttatccctgacatctctaggtcaccacagacacacaggccccaaagccaagcactatatgacagttgcctgcctacctggtacaagaaagaagacagggccagaacttttcaccagaatctgtcccactttcctgactgtggctctcaacatctggctttctgaattcatcaaaaggtagtaatcactgatgagttccttcactctcacaacacaaagaactttactccatgtgagaggacaagtgccccttagtcaatacaatggctattctctgcagagcagctgtagtcataattttctggcccagcacattaacttttgtcttgttttgcattcttggtttatgaagattgacagacagttggtgtagactgatgttgtgagctctagattctctacagactggcttattctgtttgtcagagctgtgtggaaacagccctgcagcctgtgaatgacagctgagagactatacctgtaaagaagcctgaacactcttcatgacaaagagtatacagttcataaaaaagaaaccaaaactcttaaatttgtgggaatgaggcatgcaagattaattttctaatggaccacagacaatgtgatctttcctagggttaaaaagtcacattttggttggactagcaaactttgtctttaataaggataagtattgattgcaatgaccaactggcagtcaccactataggtgaagcatacataatatgtgaagccagaagccaaagctatgtgataggaacatcagaactggcttcatcctgtgacttctgtgaatgccactaaagtccacgtgatcacaggcagtggtggtcctatttgttggtatctttaggagtttagacacctagcttcccattttcactttccccagcaaaccccctttaactcgctgccatacatacacactaaactacttttttccacgcccttttctgttaatatggacaaatgttacccatggagataaactatgaagatcacctatgggtgtgtgtcaatgactaacatttctcaaaccaattctttttgagaagttaaatatttcctattgtggtgatttggatgtgaatgcccctactggcttctgtatttgaattcctggcacttcagttggtggcgctattagaggaggtttgggaggtgtggccctgacagagcaagcgtgtctctggaggtggacttccattgctttaggccctaccctgctcctagttctactctgagcttgtagttgagatgtaagctctcagcttctacctgaagctgccatgcttgctgctaagctgtccctcacattatgggctttaaccttcttgaacaatcagttaaaacaaacttattcgtctataagttgctttggtcctggtgatttatcacagtaacagaaaaaataaccaacacacacgtgtgattcatacatccctctatatcatactcagggtctttagaatcataaaggctcctggttcatttaagttttaccttccaaagtcaagtgtgagtctttcctcacatcactgtagtaactactcactcagattcctcccatttgcctgtatatttttggaagtacaggcgagaaccatcagattcctcccatttgcctgtatatttttggaagtacaggcgagaaccaggagcacaccttcactatatgatgaatgaaaacacaatcagaatacggttttcattcttttctctctggaactattcttgacaattgtcaagtgtgcaaggacggaagtgggtgtaaaggggctcctttcttgctgtgaagcactgcactttaggaaacagtcaacagtgacatttgaagcccaaaagttcctttctagaattgcttttgcgaatttattactttacattatgaagtacacccgccaatcagactaatttgccaactcattcactggataatagtaacatcatttatacacagagatgtacattatttaaggtcataaaaatctatgctgtgctatacatgctattagcccattttatttaccttagaaaaatattggaagaatatatcaaataatttatagctatttctgactgataaaaagatttactatctatacatcaaggaaaaacagcattgagggccaggcgttggtgactcatgcctttaattccagcagtcgggaggcagaggcaggcagatctctgtgagttcgagaccagcctggtctacaagagctagttccaggacagtctccaaagccacagagaaatgctgcctcaaaaaacaaaaataaaaaacaaaaaagaaaagcattgaattggatctttatccatttaattctattattataaagtctttaatacttatagctatgataattatatactagtacattatcctaatctttggggcactaaaataaattgatggatgatgcttttattctaaaaaacagatcatatgtatacaaataaactatatccatttgcaaagaaaatcaaattacagtgaaatacagaattgaatgatagaataaaatattggaggtttcatcaacacatcacatgtgtagcatatctcaagtgattgtcataatttcaaaatatagattaacataaatggtagtttaaggtatttgtaacaacaataaggagatatgaacatctctgtggattataataatgataaagtcacagatgttgccaacacttttgatacattgtctacatatgttattaagtcttagtattgtttcctcttgctgtgaaaaaaacaccctgacaaaggaaacataaaggaaggaagtgtttatttggctcacaaacccagattacactccatcattttggggacagcaggaacttgacaagtcagtcatattacatccatagacaagagcagagagcaatgacttattaatgtgtgcacgctggtgctcagatctttctctttttttcattctgtccagggcctgatcatgaaataatacaatggttcacattggctctttcccactttattaaaccatgaaaatcccttatagacatgtccccaggccaactagaggtagactaattatcactgagactttcttcctggataattctatgttgtgtctggttgacaataaacaaatatcactatttcaagaaactactaaactttttataatcatgtttgtaaaaatatgtatattttctgtatatatatatatattcaagtttttaagctcaaaatactattgatattaatactgttaatattgagaataaaagatataccaaaataaataaatataagaattgtctagagtatttttataggcaccaattcatgatgatatacacaaacacacatgtaaatgcacatgtacacacacatattcagtacagaataaaagctatgcttgaaaaagatggtcaaaatatgaaatgacaacaaagtagaaattagggaatattttctcaatgaaaagttcactattcattctaagttcaagttgtctttggcaataggataaagagaaatataagaatgagtcttaaatgatctcagcttatgaaaaaagtaagtcaacaaatatttaaatacacatattactgagaacagtcctgtgggcaatagagtcttcatgagtcatgagtcatggtttatgacgctgtgtcttaagagagcatcagtaagggataaacaattctcagatagatagctggaattaagaaaattgtattgagtgtaaaaattgaattagaaaaattatagtgctttgtggggaatgctactatttgagtcatgcaccaaattatgtactgaccctttaactaaagcagctattctagggttatgatcagttaaaacagcataatgaggatttctatggagacaagagggaaaatcacattctctttctatgacttacatatttgtaaataaaacaggctcttcatcataaacaaatccatgtatatatctcaggatcaaaggagatacttgatttcttactttcagttttctaagatttattcagtaaagatactctatttttatagctaagaaaagtgtttaaattattcttttgatattttgcaattgttatgctgttagctgtatcagcatttttcttgatagggaggagttatagctttctgttgggacagaatactaaattttaatgaaactcaaaaatcactaaaatgacactcagtttttccttaactaatcaggctgaatgacattttaagaacataagacattatttggtatagacaaaatgatttattttggaatttagtgtggtaaccctccgtagacataatgaataattacattgatttgcaataacatgctcatgattcaacacagactgcacagtcaatgctaattggcatttttgcttataatgcaaatgttaggcttagaagtatttttcctagagctcttcactacattttgttgcattttatgttggaatatgaaaaggaattacataggtaaggagtgatttttggttaccaatgcaattacctaattcaaatgctggcttactgagctcatgggatttggagatttatttcatgatctttgtgtattgtagctttttctaggttacatctttgactcccatggttctttggtgcttcccactgtggagctaaaatgctacaaacattaaatgtctgaaaatttacttccagttaagtagcatcataagttttaattttatttattttattttaattgagctatacatttttcctcactccctgtcaaccctcttcccttccaccctcccacttgctgcacactcccagtttactcaagatatcttttcttttcctccttcttaggcagatccatgtatgtctttcttaggatcctctggggttgtgtcctgcagtctggttgtcctttgctttctgtctaataaccacttatgggtgagtacatattatatttgtctttctgggtctatgttacctcattcaggatggtgttctctagttctgtaaagcaaagaacacagtcaacaagacaatatgacagcctacagaatgggagaagatctttatcaaccccacatttgacagaggactgagctccaaaatatacaaagaactcaagaaactcaacatcaaaagaccaaataatccaatacaaaatggggtacagatctaaacagagaattctcaacagaagagagaagtctcaactggccaaaagtcactttaggaagtgctcaatgcccttagtcatcagagaaatgcaaatcaaaacaactctgagataccgtcttacaccagtcaaaatggcgaggatcaaaaactcctatgatagcttatactggagagaaaatggagtaaggggaacactcttccattgttggcgggagtacaaacatgtacaatcacattgggtatcagtgtagcaatttctcagaaattgagaatcaatctacctgaagactcagcaatacttcttttgggcgtatacccaaaggatgcacactcacaccacaaggacatttgctcaactatgttcatagtagcattattgtagtagccagaacctgcaaacaacctagatgcccctcaactgataaagaaatgtgatacatctacacaatggagtactactcagaggttaaaaaaaaagacatcttgatatttgcgggcacatagttattaatttatgtgaaaaaatttattctttcaacccacacatgtatatcaagtgacaaacaatttatgaagtgtgagaaatactaagatgagtaagtccaacatgatctcagctctcagatttaaaactggattgcagtagtaaaaagagaacagaatgctgtttcgccttatttgagtttgaatcctcctcctttcacttatttcttctaaacttttctagatatataagtgcaactttccagaaaattggctatgtgtttatcatattggtataaagaatggatccaaggcaggtgaaatatcataacatagtaattatcacacagtgtttaagaaggccagatacctggcaaaaagcagacattggaaaaaacatccatattgttgttgattgtatttgtgactcatagtattttagtgatattaaagattccatgctaattcatattctgctagtgctatggaatttgtatttttgagatcatgggagatttttatgttctttgtatatgtaaatttctcaatttcagagttcagactagagattatggattcattccatcatagatgtattacctctgtgactctttcattaaatatatttcctaaattataatttgactagcattgaaattgaacacttttctttttattgaccttaagggaacacacagggtcctatcatctacatatttacaaatagcagattatatttacaaatatcgggttgtaaatccatcatgaagttcaatatataattgaaaacagtctcaatattgcagaacaaacagaaaaatagaaaaaaaagaggcaagatagcagaagtatagggtaagataagaacacagccattctaatttacaaaaatgaggaacattctcctagagaagatataaatgtgtgggatgaagacaactgggcttcataggatgaagaactgacttcttgtatctattccacttcaatactgaaaatgtatgcatctatttacttactatcacaaaatccatccttctgcattaggttcattaacaaatttgccttagctcagctgtaaagagagcttgtgtctcttctagaggacctggattcagttcccagcaccaatattgggcagctccctactacccataacttcagttctaggggacccaactcacgttcacctctgtggacaccagtatgcacatggtacacacacacacacacacacacacacacacacacacacacacattcttaagctcacacacttaggcacacaaaaaactaaaaatataaatcttaattctgttttagaatttttgccatcagattctgagataaaagtattccatttatcagaaaagaattctgttatgtcatcattaattttacattacaaaatctcataaagatcaaatgtacacctttgtttttaattggcagccttaaggacttaattggattaattaaaatatatttgtttagaagaaaataatttcagaagagtcagtttatttctcttcattgtgttatttatatagtatatgatgatataagaatttgcaaaacagtaactttctttgctgtcaggtgaacattatatacttgaatgaaatgttgctttcctctctaacttacagcatattcctgtattccatttaactagccatcatatttccagttactttgatgaatactctgtgctttaacttagagccaattattgattataagtagagtcaaacaatgagatcctatttccttctgacgctcgacatccatctatcattgatgaattatctccttatctgaagcagattgtggcctctagtctctcaggccagaaggaacatagtaaataaagagagagttacaagtccattgggagatatcttagtgggtaagagcacttgctgtacaaacatggagacctgacttcaaatccccagcatgggtatacacacctgtaccctagcattgggtacaagggtagggacagagatatgtatatgtgagagcttgccagccagttaaacagtcagtttctaattcaatgagaggccctgtcttacatatgaggcaggaagtgatcaagagtatcttttgcatgtgtgtgcatggatgtatgcactccacatctacatgtacacaccagacataccacacttatacataccactcatacacacatacacacacacacacacacacacacacacacacacacacacacacacattggaaaaccaaacaagctcttatattttaagatacaggttggctaagagcaaggccctggagaacagatactttttctaaaatatgtcagaaccttagaggtgccctttctggttgtcatgatggccatgcttctgctttacttggaagagtagatatcaaagcagttgaaaattcctgtgtgaggattgatgggttatcacatttagccatcaaatatgttttacaaattgagtcatgtccaagaagaggcatgcttcctacctctagtgaggtgactgaatgaaataggggacaaaaaaggtgaatgtttaatttttacaaattggcattcagggtcacctctgtgcatcatcataggctccacttgtggaatattcaaagttgaaggtacaagagggtgggatgtgcagaggttacctgagtaacctgctttgcctgagtgtgagagtgtgagagctgactgtgtttatttttcccagccatagacgcaggaaccatgacttggcttttgaagtaagccatggctgaggatttatattgtgccaccaacattttctccactctttgtcagatataaaataattatttttagccaacttcaactttatgatttgggagtgtgaaatttcaggctacaatgctggaatccccatcttctaagccataaataattccccattttgtcccactgcattttcacaaatatggacattaatttcttagccttcagttgattagaaaagtctgctaaatacaatgccttcttctgcaatggaagcagcatcctgaagtatgattgtaattgcttcttacccagatgacagaaggcaatttcaggacctgttttacttaattaggatgcatgagcctgggccagcaggtcacactacctctaaattacacttcctcaatattttttgagaaagttcttctgtctctgcaaccttgggatgtgtttagaaagacatcactatctcaatgccttcaaatttcactggtaagtggaaatattattgacatagtcttaagattttaccacactttcaagagtttatttactaacttgctggggattaaaggggaggagtttttaacctattggttgacacactagtttccaagaaaaaggtgaaggtcttattacaatttattttgtgtaagaacagggacctttggcatcaggcccagattgagagtaatttggaaagaaggccttgtttgcatcagtctgaaaaaaggtagctttctgttgccaggttgcaacttgcaaggcaaagctgtgtaaaatggcagcacagggatttgtaaaacccctccagatcctctccacatcacagggtagctcaaggggagttgtggaattgagagacatgtgtctttacgaatgagaaaaatgcataacttcaagatgactcaaacttgtggcttcaaaatgatttggtatttgagacagcatttagtaagcacttatgacgacacaaggctatggctgaggtaaaggagaaatgaaacatagctgttatacaacaatagtgcactatcaataaaatggcaataaaattctatatagtagcactcaaatatacaaaagtgtcttcattgagtatgtgctatgttgtgataaagtctctaattgttttcttaggctactaactgatcatccagtgctggccaagtttttctatgactatttcccaacttgtgacatgggagagtttttacatttggctgattaggtatgtaagactactttactataaccaaatagacatcaccactgaaacctgacagtgagtctgatagctagggacattgcacatgatcatttttaaatatatgacacacattcaataccttgcattttttacttttattgggtagaatctaagatgtgtctcaaattcagtgggtttatacaagtaatatattgtaatttctgcattagccaagcttataaaaatgtgtgagtgtactcaacactccttcatgatgaaagtcttgtggagattagagatacacagaacatacctaaacataataaagacaatatacagcaaaccaacagacatcaaactaaatggagagaaactcaaagtgatcccactgaaatagggaacaagacaaggctatccactctctccatatctactcaatacagtactctaagttctagctagagcaataagacaataaaaggagatcaaggggatacaaattagaaaagaagtcaaacttttgctattggctgatgatttcatagtatgcataagtgactccaaacattctaccagagaactaccataactgataaacaccctcagcaggatacaagattaactaaaacaaacaaacaaacaaacaaacaaacaaaaacagtagccctcctatatacagttgataaatgggctgagaaagaaattagaaaaataattccaattacaatagccacaaataacataaaataccttggggtaactctacccgaacaagtgaaagacctgtatgacaagaactttaaatccttgaagaaagaaattgatgaagatatcagaaaatggaaagatctcccatgctcttgggtaggtaggattaacatagtaaaaacagcaatcttaacaaaagcaatctacagatttaatgaaatatccatcaaaattctagcaaaattattcacagacctcaaaaggacaatgcccaacttcatatggaaaaacaaacaaacaaacaaacaaacaaaacaggatagccaaaacaatcctgtacaataaaggaacttctgaaggtatcaccatacctgacttcaaactctactatagagagagctacagcaatgaaaacaggttggtattgacataaaatcagacaggtggaccaatggtatagaattgaaggcctggataccaattcacacacctatgaacacctggtttttgacaaagaagctaaaattacaaaatggcaaaaagaaagcatcttcaacaaatggtgctgacatagctgaataccgacatgtagaagaatgcaaatagccactcggagtgaggtaacccagacccagaaagacaaacagggtgtgtactcactcacaagtggatattagatgtaaagtaagagaaaaccaccctgcaggccacaaccccagtgaacctagataacaaagattaccctaagagagacatacgtggatcctcctaggaaagggaaaaagacaagacttcttgggtaagctggcaacatgaggcatagagggaaggatggaaggggagacggtaggaaggaaggggagtagggaaaatgtataactcaataaaaaataaaattgaacacaaatcacaaaaatgtatgtgtgtgtgtgtgtgtgtgtgtgtgtgtgtgtgtgtgtgtgtgtgtgtgtgtgtgtgtacatcacatgcacagaagagtccatagtcaatctaccacccaaacactcagcatagctcttccaaaatggaggacattttgtttatttcatccctcatgcagcatagctaacagtgtggttagcttattctctcggttaacatccttcagaacatgggtaagatgccacagaaatgcacaaaacctctcatcagaaaatgcgacacccaatccaataagtaatgtataagagcccatggtctggaagatgaaagccatcttgccatttgtccagtccactctcagttctataatgcatggatgcacaagaaaatgacaaggggaaaacaaaacaaaatgaaacaggaaaacaacattaatcctatggaaaaaggcagtgaatgcaagcaagtatgtggtacagcccatttattcttggggctaagcttttatcctttcttcagtcaaaacagagtacttactgattacaaaagaactgaggtctaagaattgattttaatgatcctactgaattttcaagtcttagacagcttagtgagataaaagcccaagtgacagagtgtaaagtgttttcaaacagatttgcattgttcgagtccatgggttgttttgtactttagggagttggaagacctgtggagaagagcatattaggcatttgagaacattttactgctaacaattacagatgtggagaatgacacagtgtgaagagatctgggatgtttcttgcctttaagttcaaacctttattttactgattgggaaacagaggtccagggaggggaagtactgaacttgcactcatttctacaggccataggtctggtgattccccactaagcttgttaattgaacgaccgagctgaaaacatttttccatctttccctcctcctgaacacctttctcccttacaatacatctctctgcttccctctgttgctgttattcatgtactttaacaaacatttcctgagcatcaggtggaaggaagcatagtgttagggatgaggaatttggagagagccctggactcatggactcacacagtctaacatgacatatgggcacagcatgtcctaagaggtcttatttacaccgcgacctgaaaggtgagtaagagatggcctatcacatgaaatggtgagtgacagttccaggaaggggaagcaacatcttctaatgtgcttgtgggaatttggatgagaatgcccccccccaggctcatatatttgcagttctggttttcagttgaccggctttttaggaaggattaagaggcatgaccttgttgaaggaggtgagtactaggagtggtattttaggtttcaaaagcccttaccagaccagcttttctttcttcctctctttctgctgcgtgcatgtggatcaagtgtaaactcacagctattgctccagggccatgccagcacctgttgccatgcttcccgccatgatggctgtgggctagccctccgaaactctaagaaagcccccaattaaatgcatgatttactatgtttccttggtcatggtgtctcttcacagtaatacaaaagtaatgaagatagtgccagagtaggtggctgctccatcagttctaagacaaagaagattttcaaggaagcatgagcagaaatgacatggcagaaaacagcaatattaccatttgtcttcatcttcaaggccaggactccagacctcagccctgaattctctctaaaacactatttctgcataacctttaaataaataattcagaaagaaccattttgatgctttacaaaaatagagaaaaatgtatcacatgtccatactaagaccatgagtgtcagtatcttcacccactccctgaacccttgtgaagccagagctcaatggggacaagttggggactctgagtcagatacaccatgaatttcaagcctgacttggagtcttctgatgtttcattctggagcaaatatttcaatggaagatttggttttctctaattcaggattagaattcaaaactgcccaagtgtgttatacagaacacatgttacaagccccacaaagtggctggaacatgaagctcttacaggtaatgaataagtggataaaagaagtagaacatttgaaaagttaatgtttaaccacagccatagatttagaaaaataaaagaaatacatactctacactttctacataaatgctgccaagattgaaaaaaaatgtacttttttttcaagagaatatatttacttggagtcaagtgtgaccacaaaaaataaaaaaagatgctaattagccctcaggtcatagacatggtcaactcatcccaacactatgtcagccaatgaagataaacacacacagattccaattctcagcaggcataggtagagttctcaaagtcattggaaacaagatgaaagtaccatattcctcagggtctcacttcatcttctgcaacaaaggggtgatacctccttgggaggctctggatcaaatagaggtaagagagacagaaacaggaagataatttacttactcattaatattagccatagcagtaacagaagtagtagttttctctgtgtctgtggcatagtaagtgttcagtagatgttatgtttgtagaattcatagaatactgtcataatttgtaatataggtctgaaattacaacactttgataatttgattataatggcaattctaaaatgtcatttaggggcttggaaatatgtttcagtgacttagagcatgtactgtatagcctcctcacccatttctggcttccagaatgtgtggcccaactaacccaaagccttagttatagacttcctagaatcagtcctctgcccctgctttcctgcctagcagccacctcacctactacaatgatgtggggatgcatgaagttttcactcagaatctgaactgagacttcagataggaactcctggagtaggtccacttccttgtccagttgtcagccatcccacctactgaaagcctccaggaccacttggaacccaacccagaaccctagttataaaatccctacaaccagtcccctgtaaccacctgcttgcctaacagccacttcactcaccacactgacctaagaatacatggagtccaaatgcatagaatgaactggaactttaggtagcaactatcaaaaccagtcaactcacccatctgaatatcagctaatccatctactaccatccaccagacctaaagcccttgttagagatctgctctgcctgactgcctgtcagtcaacctacagtcaacctacccactataagaagccacacctagaaccccagagtggcctcaagcttaaaacaaagcatcatttaattggttggcaacctgacaatttgaagtaacaacaatcaaagttccaactcctatccaaaagagccccaaaaaaaaaatccacatcaagtaactccacaaacagtttgaacaccagcaaggcggtgggaggtgcctagaaaccatctccaaaacacaaacaatgtgaaaaagcaagacaatatgtctccttcagaaaccagaacctccatggtaatattcccaaagaacacaactgatgaacaagacaaagacttcaaaatagccattataaatgtgtttgaggaactcaaagaggacaggaatataaatgactgaatgaagtctgaaaaagcacgatgagatagaagcagtaattggaaatctcccaactaggagctgaagggattgttcaaagaactcttgctgctttcacaaaggacctaagctcaattcccaataaccacatggtgattcacacttgcctgtaactccaattttagggaatccgacaccctcttctggccacattaggcagctatacacttttgacatacataaattcaggcacataaatgtataaaataaaataaaaatatcttcttaaaaactatcctaagtagaagaagctgaggcacagatggatacagtgaagaattctatcagagcttcaaagaagtaacagcaatattactcaaatttttataaaatagaaaaggaaggaacatttgcaaattctttttataaagccagtgtaatattataatgatactcaaacaaaagactcaaaaagtttatacaccagtatttctgatgatagatacaaaagtacttaataaaacactttcaaagtagactcaggaacacatcaaaatgattatactctatgatcagattgatttaatcatagaaatgtaggcatagctcaacatatgtaaacagataaatatattatgccacataaatggacaaaatgacagaatatgcatgatcatctcacagatgcagaaaatatatttgagaaaatttatcaataaacattcgatgataaatgtcctggaaagattgggagatacaaagacatgtcttaacataatagaggcaatttataacatgcctacagacaacatcattctaaatggggggaaatttaaaatgtgtccacttagataaggaacaagacaaggatgtctactctcttcacttctattcaatataatgtttgaagtcttagctaaagcaaaaggaaaagttaggtatattaaagtgctattaatatgaaataaagaagccaaagtattcttattatcagattatatgattttatatataaaagacataaaagatgaaaccagaaaattacagcagataaatgcattaagcacaatgacaggatacaaaattaaatgacaaaaatcagtaagtttctaatatacaactggcaaacatgactgagaaagaaatcagacaaatcctactcacaacaacctcaaaaaccttggaatacatataaataaggaggtggaaggcttgtataataaaaacattttaagacactaaaatattaactgaagaagataccagaagatggaaagatctcacatgttcatgaattggtaggattaatattgttaaaaatctaccaaaaggtatttatagattctgagcaattaccatcataattacaacacaattcttcatagatattgagaaaaaatcttaaaattcatatggaaacccatcaaaaacaaggatagtgaaaacaatcccaaacaataaaagaactggtggaagtataaccatgcctgatttcatgctatattccaagctacagtaataaaaacaatatggtatgatactggcagaaaacagacacacattgaacagtagaatagaactgaggaacttgacataagtccatacacctatgaacatctgattttggcagagtacccaaaaatacagacttgagaaatgacagcatcttcaacattggtattggtcacattgtacagctgtatgtagagtagttaaagtagttatatgtctcaccatgcacaaaatccaaatgaatcaaggactgcagcataatatcctagatctggtagataagaaactacagaacacactttaactgacatgtgcagaaaggatttcttgagcaggaccctaatagcacaggcactaagactaacaatagacagaactaaaaggcttccataaagtaaagaattcatcatcaagtgaagagaatgtctactgaatgggaaaaatatttgacagctctacatctgacagagggttaatatctgggacacacaaagatctaaaaggtaaataaataagtaaataaataaataaatagcaaacaaaacaacccaattaaaaagtggggcatggaactgaacagaaagaaaagatgaaatccaagtggctgagaaacattttttttaaatgttcaacatctttagccatcagataaatgtaaattaaagctatcttgagatttccaagtcagaatggccaagatcaaaaacaaatgacagccgatgctgggaaggatgaaggaaaatgggaacacttattcactgctgatggagtgaaaactggtacagccactgtgaacatcagtttggaggttcctgaaaaagctagaactagatcttccctaagaacaaactgctcaactctttggaatgttcccataagactccatttcagactacagagatacttatccttgttcatttatgatttatgcaaaatatccagaaaatgaaaacagcttagataccagtcagcagaagaatggacaatcaaagtgttgcatatttatataagtgaatattattcagccattaagaataatgagattatgaaatttgcaggtaaatagatggaactcgaagcaatcatcctgaatgaggtaaacccagaaccagaaagacaagcatcacatgttttctctaatatgtggttgatagatcttaagctttataagtgtatctttcatatgaaatggctagagaggtgatgtaactagtaaaggaccagagaaaaggatctttcaaggaaggagaaattgaatagtgttataaagaggaaaggatgaaaaatgggacaggaaggattaaatggggtaggggatgggagatcagggtagagcatggaatgtggggagatggataacactaaagacttttgaaaaggccatattgagacctaataacatagaagcttccatatatatatatatatatatatatatatatatatatatatatatatatggagagagagtactatatgcactgtcagagaagaaaattgataatcagtttcatttagttatatatctgcaaactatgataatctggcaggacatgcccattaataaaatattggcaacaaatgctattggaataaccaatcactttaaaaattgggtttaacattcactccacagatacaacccatacatacttggcccagccaatgaagccaagaacctgtggttagatagttcatgggctgtagtggagaacctactactattattctgctggaaggattaaaatgacttgttgctatacccacacaccttcatcagagaagcttatatttgcacaagatggtggttaacccaaagacccacatgaagagaataagaaaccttagggtagtgagccttaaatgggacatctatgtcatacctggcaccattaaggctcaggaatccacaaggaaaagggggcagagaaattctaagacacagaattagaaacagtgtgttttctggacgcaagagggcaattgtacatatgaactcacagcatttgtgacagcatgcacaagacctgcacacctttaagcatggaggggaagaggtgaacatgaagtcccacccctatctgaggagctattggcatttgattgctgccaggaaagagaaagttttggtcactagtacagtgaccataatcccgggcagacctcctggacaggagtaggtgtaaacaaaaattggacttgatgtgatgtgtttaagggggagggagatggagaaggagagagaggaggatgggagagagagggggcagagagagagagggagagagagagagagagagagagagagagagagagagagagagagagagagaggtgaagctattcagataaggaggtgagggggatcagggaggagacaggggagggggatgaatatgatcaaatacattgtataaaatggtgaaagaattaataaaccattattgatttttaaagagcatatactgcacttgcagaggaacaaagttcagttcccagcatacagtttgggtggcttacaactgcctacaactcaagctcctaaaggatccaaagcctctgaacttaatgtgtactggcatttgtgtgcatgtatccactccccacacacataactgagtatacaaaataaatgcttaaaaagcatctgaaactcttgctttgttcaaggcatcttatcatcttataagtgtttttaaaagtccatgttttgacacaatttctaaataagggaaaagtgagactcccggagagaaaagaaaaagcacgtggctctttttaaccctggtttcaagagctcacatgtgctttcactataacatgaatggggctgtagctttaataaaggtgagaaacaaaatgttttaggacttggagcaggatgaactcttggtggccagagttggagtctttataaaaagtttcctgtgaggcacataatttccctcaatatgttccaacattggtgacaaagccttctctacagagcagcttgccatgcatagctgctccccagcctggtgctgccttctcagaaatgttgtccccatgacactgactgtcacagctggtgttagcaatattttctcatgctgtatatgaatcattttgttttcaggatggcaccgtgtaaactagagtgactcaacgggatagtagctctctgactgcatacattttaactgtgtcttaggcttggaattagaaaagccccagtttggcagtcatcgtagttataaacagtttagaaagtaatcccagtgaatgccaaaacaagagctgtaaacttccattactaacgagtgctcatcatatgcaaatgaagcagaggggaacagaaaggaaacctaggtgaagcagatgtcatctcaagtgacaagagctgatgcccacataccacaacctggttataatcataagcagatgcaggaaaaactggattctgaaaaagttttcaaaatatttgaaccctattcttaaaatgcattaggaaatgatgatggaagactcatgtacttccctggaacacaagaaattgaagaagctgggcttggtggtacaaatgtggattcccagcgctagggaggctgaacctggaggatagagattttgaggccagcctggacttcagagacaggccctatccctgaaacaaaacaaacaaacaaaaagaatgaagaatctcaaagacaagtaggcaggtggatagatggatagataggtattgaagagccttgataatagagacaacctgagccagaacctttttcctcctattaagacattttgggacaactggcagaatctgaccaaggtatacaacagagaatgtcctcttgcttgagaaacactcagtactttgtaaaatgggggaggggtgtgtgatgacctatgccagtagtcctagccatcaggacactgaagcaggggattagaagctcatagtcatccttggctatatagtaagtttgaaggcagcttggccttcatgaaactaattcaaaagaaggaaaaacaccaaatatcaactttcatgtgaagcattatttagataataatatgcacatacacataaacatgcaaaatctgatcttttcattttctgtgtgagaaatttatgaatcccatttttagagctcatcaggctgagaatgaaaaggttaactgtctagctgtgtccttttcctacctaattcctaaaatatgtatcttaaaatgttaaagttgttatttaaaaaacatgcaagggggcaatggtcaaatgaacttgagatatgctgtatttgatgaggcccatcacttatcttcatgtccaccatgcaacctagttcctgttattcagtgtttatgtgtggcaggtacaccttccacttaatatttgcatactagtcagcagcctgtttcaaatgattgtttgctatattctttgcaatgtcttgccatccaaagtgttccaatagtaggtatttatggactatggcttgtacttaattttctttcccatgttaagccatagtaggttgtttaatatgtgccccatgataactggcaagggttgactataccatctcctttcttcctatgtgtcccttagttcctcattttcacccctctggttttcttatatgttacatacatactaaatgacctttgggtgtcctaaagcaggatgctaataaacagacacttcagcctttggttacatttgtgtaactcctcattctctttatggtccaggtaagagcagaatccctcaaaggatttgaacaagaaaagaaacaatttagataagcattacatacctggcagttggggaaaaatgaaagtgctataaaacagttcatcaggaagcaccatgctgtgttaaattataggcaataaagtcacagtgtcatgaagaaagccactacacagaccaggaaatgactttcctaaaccgtgagagtcacattcatctctattgtctgggattacccaaggggcatggctgcatttggatcacagtaagcacatactgcctgccaggtccttgtggttctgtgagcagcaccaaaatttcagtatctttgcaaaaactcaggcactgaagaaggcacacatggctgaattttctgggcttaagtgaagtttgacttactctcccccaagactcctcacacacagcatcaaacagcgctgcagttgaatttaggtgctgggggacaattgtgacccagctggcatatgctggatacaaggtagaattaagagactctgggggagaacagaaagatagaggagctatgaaaagttggtgccatttaaggttacacttaagaagtcttggctactagagtaagtagaaggaagaagtgttcatgtatcttgagtttgaaagctgacataatctacactgctgggttaagtcttcaaaacatggccttctcccatcttctctgtataggcaattattttgaatctacctcattgtcagttactcttctattctctggcatctaatacaatcttctagtcatcctactgaaaagtattgttttattttgctgtgtttttagatgtggactatggtctctcaaaaccgagagtatcaaggaatgctagaggtgcatatttccttgcttcactatgtatagatattaaaaaatcagaaagttggacaagaagaaagaactgatggatgacctgtattttagacagctctctgtgggatttgaggggtaccacagcttgagtattgctaccctcttggagaaaaaacctggaacactgtggtatccctccagatctgattatatcacttcttgagatttcttgttccttagttccatcagttttataatacaccaattttcacctgccatcttacaattttcctttagagcattcattgatgcctttacttctcagtatctgggattttccaccattatgtttcttatcttttccctttgtactttctaccatcaatatcaactattttctacaaccataattctcagtttaaatattttaaatttatttatttcattatattctgtgtataaatgttttgcttacatgtatgtctgcaccacatgtgtttgtggtacccgaagaggtcataaaaggaaatcacatccccttgcactggaattacagacagttctgagtcatttgtattgatactgtgatggggggagtacttctgtgtatgtttttcttattgattgttaaataaaatactgtttggccaatgaaacggcaacttaggcagggctgtgagtcaaagaggattctgggacatgtagtagataagtgctgatccaggcaggaagtgatatagcaaggagactcagatttaaagaaggagaaaccagaagcatctctcttttcccctcggctcccgctccagtggcacgatgtgatccactggcaaggagggacgtcaataaggcgtccgataagataagtcttataaaatatatagaattatgatagttaagactgagctagcacatgaggaatcctagtcattggccaagcagcactgaacccaatacaagtttctgtgaattcatttgggcctaacttgggcgggcagctggcgtaaaactcacacatggcagtggggttcaggcagcttttggcagaaagatttatcgaaacaatactgagaatcaaatccaggtcctctgggagagaaacaagtgttcatgctgctgagctaacttttcagtccccaattctcaaattttgagtcataggcattcaaaactatgcctcattattaatctcaaggtttccattgtttgcatggaaatgccacctctctattccatggtcttttataaggaatacaaaacctcaaacacccagacaccaccattctcaaagtagttgctcctatatatctcaccctgctctcgaaaagaaatcccaaaaagatcaggctccacctctttgattttttattcccttcctgaatgactgctggtcaagtctcagtctgttgatatattttttttcatttctaccaacttttcagtatgcttaatgtctaattatttttcaatttagcttttgctaatgactgcttctcagttaaccttctaatatgttgctctagtattttgttatgtgactccaaactgctactacaaagcagacacgattcctgctatatcctagccaatacagggatcacgtcaataaaaggtcctcagactctctcagagatgctgaattccccatgttttcactcaatgtgggatgccatctcagctctcttctatgtcctattattttgctgtcttcatgtagatattatctgttcttcctccccttctttcttcctttctttcttttctctttgggggcctgatacccagctcccaaataaatacacagagacttatttttttctttgaaacctcagccttagcttggcttatttctagccaacttttcttaaattattccatatgctttttgcctctgggtttttacctttctctaattatataactttccttcttattttattactggctgggtggcttccccctggcatcctctccctttcttttctctctcctccctctttttttccctatttattctctttgcctggcagttccacctatccctctcctgcctagctattggccattcagttctttatttgaccaatcaggtgttttaggtaagcaaagtaacaacacagctttacagagttaaacaaatgcaacataaaaaatgcaacacatctttgcatcattaaacaaatgttccacaacataaaaaatgtaatacatcctaaactaatattccacaacagttatctttgccttatctcaccacatttacaactttgtcatggcaggtgacctatctgtgagttgtaacaatgagcactgtaacttctcttcttggctaaactataaagcaaataaagacagatgccaagactgtcataaacttttctttcttttcttgtatttttcttttccttttccttttcagttgtgtaaccctggttggtctggtactatgtagcctaggctggcattgaactcatagatacctacttacatctgcctcccaagtgctagaattaaagttatgaaccacccaggcccaaagttttcatttttacctaagtacctagaatacaatcttctttatcatggatgcttaatgtgcatgttgaataaacatatctgtctgtaggatgtttatgagatggctggtggttctcagaaaagaagcactcaatgagacgatgggacagggacaaataggaaggacatagacgggagatttctgatctcaagaaacaaataccagaatcttcttagatgatagaaacttgaagtaatattgatttgattttaaatgtggagttcttattacaggctaagggacacctagagaagaacatgcatagtttattttacatctgtgtcatcttattttttaaaaagcaggtactgctagctcatacaatcaagagttctgtggctgagtaagttgggaaaaatcaatcaaatgaaaacaaagagcattatttactgctccccatcccattaaatggatagctaatcagagaagggatattataggtgagcatcttctttgccagcttggaaatgaaaataccatgtgtgagcagagatcactgggttctgactgagtacaggtataaacattctacagtctttagtcagttgtgggttttatatttagaatattatcctagtatctgtacttttctgttttgttttgttttgttttgttttgtttcgagacagggtttctctgtgtagctttggagcctatcctggcactcactctggagaccagattggcctcaaactcacagagatctgcctgcctctgcctcccaagtgctgggattaaaggtgtgcaccaccaatgcccggcttgtacttttcttcttaagactcaaaacttctagcctgaattaatcaacaagtacaaaacattcatattttcttctaaaattcttatccattattttactttaatgtcatacattcaggatccatcaataataatttgagcacatcacaaatagtattggaaagaattcagtcagaaaaaaaaaagaattcaatcagtaggttgcttttatgtaggtactgaaattttctgcattagattaggctgctaagattctacaatctatgttgtcctctatataaattaaacatattgccatttttgttatttttctttaatagtgttggaataagatacaccctgccctcctggttcaccagatgtaaggattcaatcttttatggtgagtgctaaaatccaatctttagtaagaactaaaaatcttcattgattacaaatgttgaatatgcatgacctcttagcatacatgtataacatgtttcaatgaaataattgtattccatcactgatatatgttaataataaactacaacctgattagtatacaattgtctcagaaagtaagcattttcatgaggcaagcatatacagactattttcctgggaaaaacaaacatttgttgagtactgtctttgattctctcatcaccaagttaccaaaacactagcgtttcataggtctcctggcacactgaaggtattttatcactacttgttgagtgaaaggatcctttttctactgtagtcatatcatgagtcaaagtaagtattgaaatttcatattgtatgctatggatgcttttggtgcatttcatcattctatcctagacacaggccagatgggtgtcctgttcagaataagtgctcagtatattagtcaaccgaaaaaatggctaaagctctctctccaaccttttacagtcttacacattcaattacctgctttgctttacaccaaagaactcaatagctgttctgacctaactcaactactttttaggtcctcatttagttacaagttgcctcaaatcctcacctctgggagctcttactcaataataatacacaaagtgtcagatccaacttccccaccaggcatgctgaggtcctgtgtgatgtaccatcagtaatcactctgcagtttcttttttactaagtcaggagaattcctactggttccagtttcctctctaggtactttatcacgctggtcatgggtgaaattttgtcttgctcactctgtctattcctgtgatttgaaccattttgcttacagtatacattaaagtttgagacatagtcttgggagggaagttaaaattgcagataatcatattcgtgccttgaaactgtagggaacagaaaacagggcccaattttcgagagtgcttcagaaaagcaaaacctcacctcgatgctgatgtgagagcaatgtcagtatggatttctgcgaggtattaaattacacagatagtggaaatcgctcattcctaatgtggaggagatacagagtcttcattgggctggacctatggctgcattctggcctgctttagccattacgagatgaaagcagatggaaatttctcactctcttctaagttacgtccttaaatgctgtattataaagtagtgtcagcagatatcttccaatttcagaggaaggaggacaataagtccttctcccgggaagcctgaggctactgccttctccagcatatccccacgtgttgtcattgtcacatcatcctttctcagaagtgtcaagaattatgagtaatcccatttcactaatatttattaatcattatgtccactcaggctctgttacaacaaggccattctgacatgtcttgattctcctctagttgtaccactctgacttttacccagcaacagctacatccatcaaattcttagtcatattcagagaattgaatactcatctttcagtgcacagggaaaggtctccaatatgtatgatgttgatgcatgcattctaatactaacatcctcgtacatactctacactaacataatatgcagtatgtgtgctctgtggaacatactgatttctgatagtggtcacatctgcaaagagactctccagttatgaaatatcacctcgtaattgtgaattcagcagatgaaagtaatcaagttcaatacaaaaaggggtgggggagaagcccatgccactgagaaggcatgggcctggaggaaaaagtgaagaaaatgccaaatggaaagtctttgacagtgactgacacttgtacatttctacccatttggttatcttaagtagggtgtgttggtctatgaactgaaaattgctgatggtagaggaactgacctgctatgatggagaagagtatagcttactcagagattcagaggcctacattaaaagcccattcccttcactttccaactgtgggagtctgggaaaactctgtgttctgtaccctctcagagaatcaccctccacaactaagaaacaacacgttgagtaagagtagactgtagatttcaattttagttcagagagtggggcttattctaagtgttgttcttactgtcatgttccctctcctttgaacatgcatgtacaacacacacgtgtacatgcacatgttagtaataacttcccatcaagaaattgttaaatatgaaattaaatgaaatagcaactggtcctagaacatggactgtgttccaaactcttatcaattgtgtttggtaaggtgcctccttctctatcctataattatgaggaaggaatacacattgggagtgctaaatgacaactatgaatttaccctgttatttcactggtgtggaacatagcataatgagtgcatatttattttttgtgagactcatgtaggtttcagttatactttagtaatagaaaattaaaaattaaccatgaagaactacaaatgtcctatgaaaaaaggacaaagacagggtatggtactatttctaggaatgaaagtgttacccccatttagaaagtttgttttgttccaatgctgtttatccagttttacaactggactgtaagctcccacttggtcaggtcaactgtttttgtgggtttccccaacatggtcgtgacccctttgctcatcccttcttctctacaactggattccagttcggctgagtgcttagctgtggatatctgcttctgcttccatcatcagctgctggatgaatgctctaggatggcctaggccctccctcaaataatataacagactttgatgatccccctggaaggccccaccctccctggggagtgcatggggagtgagacgatgggttagtgggggtcatgggaggatgggagggaactgggattgatatacaaaatatgattgtttctaaataaataaacaaataaaagaaggtaaaaattgaagcaaaaaattgttaccccaactaaccctaaaccttttgccatgtcagtcaagaaaactacagtaaagggttttaaggagaagggacagaaccaagttcatgtactaggttaatgatatataatcattgcataaccatctaataggaaatttgtatcttatgcatgcaatttaccacaatgaacatgtgtcttaaaataccacctattgccaagaagtgcccctttttaattgtgtgcctaatcatatccacagtatatctgagctgatctgacctaaaaatgcctttcctatggtgatgggggaagtacttctgtgtatgtttatcttattgattgtttaataaagttctgcttggccaatgaaatggcaagttaggcaggactaggagtcaaagaggattctgggagatgtagtagaaaagtgatgatctaggcaggaaatgacatagcaaggagactcatattaaaagaaggagaaacaggaagcatcccccttttcccctctgcacctgctccagccgcacaatgtgatccacctgcaaggagggacgccaataaggcatccgataatataagtcttataaaatatatagatgtatgataattgagactgagttaacagatgagaatcctagtcattggccaagcagctttgaacctaatacaagtttctgtgtattcatttgggcctaactcgggcggacggctggaataaagctcacacgtggcggtggggctcaggcagcttttggcagaaagatttattttaacactatggtctagctttcattgtaccacaaaatactatgcaagctgctaagggaggggaataattaaacagtcctatgacacctatgaaccatgacaattaccagtatggcaagatatgcataaaggagcaataagtgacattcacatattggtgatgatcaacagctggctaattggacttgaggaccatttaacagaagagaaatcatgcctggtactggaaacctagccagcttactggggctagtgaggtcattgatcttagaaaataatctactacagacactttgctagtccatcataatttcttactatattctaaatcttatcttcagacacacagataagtgtagctaccacccctcatcagagaagccttttagcagcaaatggtaaccacagaaaaccacactggacatcatgacaacatcatgagatcgtggctagccaatacacaaagagtacatttacattacagctcatgcatctgtgacttgggcgacatctgggaagagggacagaaatattttaagagacagatacaagaaagctgagaaagggtatcttctagaaatggctgcataaacaagactggaacgatggcaatattagtagacactaatggacatggaagggggaaattatgaggggtcccattcctagaaaaaaattataggcaactaatgactgctgggtaaaggagaattaacctctcccagggagagttgtcagccctgagttcatacacatacaaacaacaaaaatagactctgcaggttgtatgtatgtatgtatgtatgtatgtatgtatgtatgtatgtgtgtatataaatatgtatgtatatgctgtcaacttgagagtggagggcactggaggatccaaggtaaggtaattagaaggagctggagggaaggaaggaagaaagaaagttgatgtcattctattgaaattaaaggagtaataaaaaattaaaaacctgttttaattactctttccacactaacattttctctgaacaaatggttatactatgaaaatctattagactgaggatcatggactctgtgtctctactggcttgactttattcaggccatttttgagtatttctgacaggactcaagaatttgtttaattgctcaccagtttaccagttccataacaaaattcattaaaacccatttgttattcaatttctacattgtgatcactccaaaacaattctcctccatttttaagagacagaagctgaagttcataaaaagagactgaatctaaagacaccaggagtctaggaatggagccaacacataacacatggattctgtatcacagttagtgggcttttctgcagaatactgcttcaactgtataaagggctctcctactccaggctatgctgtacaaaagatggagagaaaggggtgtgtattgtcttatctcatattcctaaagaaaatgggtatgataccacaaacgtgcaattttagcactggggaggctgaagggaaattttaggtcagcatgggctacatagaaagggcctgtctaaaacaaaaaacccaagagcaaacacccaagaacaaaatatgccctggatattcatgacaatataccctgtcaatggttctcttttctgtcaccatggattactggagaatgcagttgtgttgttcatttcagactcatccaggagatatgaagggaaatcaattatctgttaattttataccaattagtacacaagtctagcataaattggaatctatttctctactgcatctgaatttcttcatcaaatatattcttcatattgggataaccaagtcagagggacagggaaagagtaaatgcaccatggtggtctcttggtgtttggttctgtacctctgcagaagggtagggtttagggaacagtgccatcgtgctagaagccactatgcacatccgtgtgcctatttctttatagcagagcctgatacttgggtaagttaaaggttatacagataataaaatgtcagatgaaaagttcccatccttgtatctttaaagtaacttttcagatacaggtaaaacaaagccacagtactgataagagctgactaagataagtgattcaaaagaaacattgttttgtataaaccccttatctgtcccagagtaaatggatgtgcactgaaggctgattgacttttagagcatagtggaccaaacaaaaccaaatatatgcaaagggtacatggtgggctttggtttgagaacagattctcattagctagtagaagcattataagatattctgttcagaaagtattctgagagcttgaccaagttggaaataaagagtaacatgcttgattaggtatgtctgtataggttgtggggaacagaagtagtggcatgtgtgtctcagattttgtcacccttgctttaggcataaattcagaaaatacctaacaatagctttcacaaaaagttctaagagcttgcttctacatctattcattatctgaacccaaaaccaaacaacatacctaggagtgtgcagcaatggcaagataccattggcaactctcttcaacgtggatgcaaagcacacccaactttcaacagaggaaatgggctttccacaagtgaaaggacagaggtccttgacaaataattactcttcatattagttaaaatatccgtcacaagctaaatattctcaggaaaatacattacccagaaaatgcagctacagagtgctgcctctactttaatcattttgtagtactcaaaggaaatcaaattctactaattttagacattctaacaacattggccatttgactctgatcctgaatatacagcacatagacattgacaattagatgaagatgattgtttacagtaactttaggttgttgcctttgttatgtgctgagtaatagacaggaatatcatctgtggaagctctagtgacaatgtcacataatataacccttagtagtcagattatttttcccatagagatcagtgcttgggataaccagtctctgagaaaatgcacatatcatttgtagtcttggagtttccagtccaagatcaaatggactcattctttgtgactctgatgggcatgtcagatggcagtgacgggcagggagcatggtggaataatcttctcagctcatagacaggaaacaatagagaagaggaagggtctagggactcacaattgagggcacatacctagtgaggtgaggttcttccacaaatgcccatgccctgaatgtccagggtactttcaaatagtctaccacagagaacgagtcaagacttttggatcattgttgaatggtcaacaatcagactattgattctactttggagataaggacacatggaagcaacaaagtaagtcatcagggtaggccctaatctaatgtaatgtacaagaggaaattgaggcacaaactggcatagagtgaagacattgtggagacagagggagatagcaaccatttacaagacacaaagaaaggcctcagaagatgccaagaccaccgacatcttcatctcagggttctggcttacagatttgtactttttaggtacagaaagtaccatctccctttggtaatttcttatggcatttctagcaaactaatcaccatagcatgtatggatctatctatactcctggcttgactcttgaggtgtatctgtgtgtactaagcagacagaataatgaaaggcaaagccttcttggggcatcaggtaagtggtaaggtgcagatgttcttttgatattgagatgcagtctatagagtaactttcattttttaacatcttcagacaccttaaggaatctggttacaacactttggacacagtttcccatgccctccccattgctccttctccctgtgtttctatgatggaactactcctgtctctgcatgtttaaccgaaactctcaaagcactttttgaaccattgagtctacttctgcaaaaggtctttcctggctggcctcaaccactgccttttttactcggcttatataggtaaagacagtcttaagtgcttaagcgctacctctaagcagggttagctaaactgccatttgattgcattgatgcactctcgtggatttaagtagagtttcctgtcctttcgtcttataaatttccagcctttgttctttcttagcacatgtttcattttctttgaactctaaaagcagaatttctatgtagggagtgcacttgatatggctggcactttatatcatcagctctatcttcaaacctccctgtctgaaagggtaggaaacaggtgatatttgtgaccattttcataggtaagaaatatatgatcttcaaagacttcagtgtggctgaaattgtagcaaatctaacctaaaacccagcatttcctagtagtcatttgctttgaaatgttagtcaaattcatgtcattgttccaacctttaccctgttctgtatactggatatgctactatttacataacatttcttttaactcaactgaaaacttcatctttgtatcattttaaataatatgcagttatatatttgatggaatatggggtacagtgtttttattttaatatacatttaatactcaagattttgtagtcaaaacctgggtcctgacagccccaacaagctaggctcagaaacagcaattcaagaaacagctgacattttgtgtttctgacggcgtggacattgtactctgagacatcctagtcagaagtggtatatcaagggcactccttatatagaaattctgcttttagtgttcaaaggaccgctctgactgttgagtgctgtaggctttggttatttttgaaatggtgcaccccattctcttggttttttttcctctgtcgagtctttagctgttcagaatctcttgataataatgaaattaggaaaccaagctattggcagagatgacacagctgcatagattagagcagctggccatacaatataatcgagtggttgcagtgcttggagaggtcagcatctagcaggcatggtggataaattttagaaacggagagcaggacacagctggtataccgggggaacccgtgcctgttaaaaaacaatctcccttcctgcttgccttttggattggattttctgctgcaataattacatctctatgatacagttttcaaagttcagtagctacccataaagctgtcaataacctggaggagatggaacgccatagtttcgttaatttaacttcaatatggccagctgtttccatcatacttaacataggagtaaaacagggagctcagtttcagccaatcacaagtgtcattgctcagccaatcagaggcatacaacttagcataccagtcccaaatcaggcacgtgttcaggtctgaccaattagatggtatcagctgctcacactttgacctatctctttcctagaccttatggttaaatatgtgttacaggttgtgggttgcagctggagggggcagggaaaaggtaagctatcacagacaaaggctagccaagcacaaggatttccctgttagtgtcccttttcagcttcccggtgaactctcttcctccagcttggagtttcatttccaggcacactcccctagagtttctcgagcagttcccaggatgcttgtttgcagatgcaaacgagtcagcctggtctgtgtatttctaaacagttcatgaaaacctcaggttactttcataatcaagggagcttccagagtaaaggagccatgtctccccgtgctagattgtcctcagagcaaatgtttcacagttttgatcacagtagtttaaggctattgtatgtaacagataatgccacattgacacactgtttgccactgttatggagatatattttgattatattcacttcaattaccaatcagttttaaagtccatcctcaacagtgtgagtgggtttaagtgaaggccctaaaagcaaaaatggaggttacctgggaagaagaaatgctacctcaactgcatctcctacctgatttcccaacctattctataaattatggacttgtcccatccccattagagccaatccattgaatttctttatgaacacacgtgctcatgcacacaccacacaaatacacactattgactttgatttttcctaagcacactggcacattgtgcaaatgcaatatgcatgcaggaaggcagccaagactgcaaggagtctgaaaaccaggaggatccctaatctgtcgcaggtgtgacaagtcgctggaggtgagagttagctagaataaataggaagatgggaagtataagtgagattgcatacctatcttcatacatttgaaggtttaaatgtggaggaatcaaatatattcttgtagccccaaaaatagaatagtgctctaatggtagaagttacagtggttagaccagggatcattgcaagctaagaaatggctaatcttgagcactgagttgacttcccctcaaaacacagagttcatagggaccagattccaataagaactgtactatgaagttagacaaaggactccttgattaagagaggaaaaaaagtgtggcctggaagcttttcctgagctcagcagagtcgaaaccacagctcccatttaccggacatgcttatgtgctgagcactgtgcccagtggtctgcacattttattactcaactttatccttccaaaccctgagatgtgctttcacatccttgcttataaagaggaacagaactcatgaaagattgaagcttccccaacacaattcagtaagttgtaatactagacttcaaggcaagacctgtctgacttttcaggctccctgtagttcttacaatagaaagctcttgcatcagagatctactttcctataacagtacaattcgaagtttaagcacaatccaccagctcatgtctttgatccataacttacttatcccaattatatctttctttttcaatcttcagtctaacacagaaaaggcatcttttcaagggaagaccttgtttgtcaaaggattcaaagtataaagtatggattcttctcttaaacaaacacggttgactgcagacacttgttattttggaacatggccatggacaggctaggcacggtccttgccccaccaagaaacttcatctcagctatgaaaatagatactaaattgaaatgtatccctaagtattcaaagacaagttgtcaccaatgcagaggaaaagaatagaactcctagagtattttgtgagtctttatctcttctaggttgggaaagatggctctccataaatggctgcagggtgaagggtgcatgatgtttagtggggacaggatacagcgtggctctggaggtgtaagaaactggagtccttgaagaattgatcaacagatagtgtggctgctttatgaagaaaagcagcagagactcagaggcatgagctgcagctgaagaggaagatcaaggccacttcatgcagggccatggaaaatgtgtaatcttttaaaataaatgcattagagatgaaaataacttggaggctcagacagttcaaccataaatttgcagataaatcatagctagaccttgggttgtatatgaacaggttatacatagcaggccttatatggttagtcttagaaagtttctgtttgcaaggctaacatcagaaaacccaggcactcagaagtccccactaaaataagaaagagtatgtgagggttcctgaatagtgaaataatatggcttatgctgaatacatgcctatcctctaggaccctggaattttaagacaccaagcagtgggtagctatataagcacaccccagtaaaaatcacgaggagatggaccttttgaaatattccctggcaacactttacaaaagctgtcatctgttcctggagggataaagactttctggggccttcactgcatgggactcttggaagcttctgattgtttccttgagtgtctacctaattcgatttcttcctttgcccatcttattttgagtgctttctctctaatgaatctctgctatgaacatgactatatgagccccactagtcctaacaaactactcaattggatgggagtattcttggagactcttggcacagggagaatggctcctctgacctagaagcccacagagactatagaatccaagcattctagttgatcaccgaagggcataaaggcagggcttgaatagtctgctgcagctgggaaattgagcttttacatttgcttaactactctagggtctggaaatttctacagtgatccacagctgggtaatcaaaatttaaaaacattcaccaactttcaatgaagactcataataaatattaaacagccacctgcaatccccagtgccactgccctagattttccaggaacatgccattttacctttgagagatcagaaagtccatgtcatagctctacacagttctaacttatatgtccttattagaatgcaggatgcactaatgagtgtaataaagatgtacttcagggtatttcaattttatgcccttatattaagttatccaatcttatggtttaatgccctcttttgatgcatgcaatttattatacaggatgaagaaaaacaaaaagcatgcctttgcgttttgtctgttaattgcaaaaactatcaatagaaacatacttgaaatctaccacaaaatgtttatcacaagatacagcagatttcactgtggccactagactaatgcttagaagaaatgactttgtttactgaataactttgtttgggcagatgcaaattcaatttctttattcatgctttctcagaaaagaattaaaggtcataaaacattgatgagatgagacattggcacagaaaatcgtcttgctttctatagtagcaactgagcaatacaactctgtttcatttctgtgggatccagctgctttgtttccaatgtcaaagatctgattttatatcacaaacccaaaactcaccctcctgtcataagctaccacttgggaaagtcacagagcaatgatacctgacacctctaagaagcctgacccactgtccctatgggacagctcatcaatcaatatcaacaaaattcttcactgtcacagagtacaagtagaacttttacaaatatgtatagggaactgcttcataaggtgcttgtcatcagaaataacctttggtagttaggaatggtcctaatctagatatattgcaagattgaaaggatattaagtgttaaacaacagatacacatcacgatcatatggtcataaaagacataaacctgaatggatgatgaagtctgtagaggagggatctacattgaaatataggaactggaggggtttgatggtcagaagtgtgatagatttctgatggagttgacaatgagataaatgatcatttaggaagacatatcttgactgggatggttgaggggagaacatagtcacagaggtaatgcaaggcagggctggacaggcttgtacaggcagcccaggacacaatcacaatctaaagctcatgatgaagtgtgggaatgaatgatgtctttggagcatggttcctttgttttcaaggtgacatttctggagacacccactagaagggaagtgttgaacaagctgagagccactgaaatagttctggaaagaacctggacataaacagcaacacacatgcctattgaaatgatatcaagttgtaccagaaacataacacaggatatatatatatatatatatatatatatatatatatatatcataacataggagaaaagccagccatcattggaaatactgagttttctagatggtaagtagtcttagattctacatctcataatgtactgaacatcggacttgtaatcttgatcataattataatgaagcttttagtagtgtcattattgctttgttgtcactttcttagcttctcaatacttgaaggctaggattgtgtctcaagtgcttgtggtaggtccagcatattgtaattattcaaaaggtgtaatgaatatatgtaggcatgctaggagtaacttaagctacacaaactagaggggagtgtctagccatagttgctcatacacagcttcttaatttggggggtcataacctcacatgagtctatgtgaataaggcggggaggcatcacaaaatatctgacaacactaagaggtttctgaatattcaatgcccagaaattaattaaaaaacaaatgtataatgaatctgaggtatttctgggagcattcatcagtgttaacaaggctcaaggtggtcttgcttttgaaaacacaatatgcatttttaatgctgtgcataccatcccaccaaatagtaccaaggaatagtggtactatttagtcacaatagtgactaaaaaaaacccaggctcagattaaaactattgtatattatggattttagtgtttttattgacatgcaacaatgtcaactcttacagaagcatggtgttttaaatacagaaaaaagagatgattttaatattttgctgtcatcattctataatataaattagtacatatttgtattgagctatgttaattttttattttaataattgttacttgagaggttaatggggataactgtgaccaaaatgcattgtatacacatgtatggcaatgagacccatttttatgtataattatatgttaatgaaaatattaaaaatcattatttgacttgacttgattctcacagaaataataaaatctgattcgtggctaaaacataattccaacaatttttgaaatctacttctaccatgttgtaccctttatttaatggaggtagattttcagcaacagttattacaaaattaaaacatctttcaacactgaaaatgctgaagttgcaaatatccagtcatgacataatgattcaattattcccattaaataaatcagcatatctatcatattactatacaaaatttctttgtatagttttatacggatagttgtgtatttttatgtacttatgtaccttaatcataagaaattttcttgggcaaaaagaagaaaagtagaaaagttaaaatgccctgatttttatcacattgtactagagagtgaggtgacagggcttctaagtaagtggaacatcggaggaggcttcttgataacttatgagtgacagttgttaaaatctctatgttacataatagattacatcactacaatgagtgtaattgaagaggtaacagtgaataatctccgggataatggatgaagagaccatgtccaagaggattgtgacgtaaagatgacttttcatgctaaactggaggaaaggcctctaatccatacaaagttttttcagcattatgaaaagctatgaaggcgtttccttctgatactgtggtcattttacatacaaacacaaaattgctcctctttaaatatcaccttaatgagtgaatgaaggaatggatgagggaattagagctagaagactctctgtgctgctactgattagctaagtaatacatccaatccccattctagaattctgtgactcagtaactcattccacattctgaataataggatgctaatgtccgttaagggcatatagttaagctatctgaattcattaagaaaacattgactatgtttataaagcctatagcaaaattttacttatgcaaaaccatttacacagtcatctctcttatctagaactttcctagaatgccaagtgatcaaagaaagtaatcaaagtgtgtatcatatttgtgtcctccaacttgtgacttttatgcacttgacacaatccagttttcatagagtcgaagtagtgcatatctcttgtcagttccccaaaatccacagtaggagcagagtaagacattgtgagtgggggtggggagggggactgtgcaaaggaacattctcaagagtaagcaataccatttagaagcaggagagtaagaaaacagattaaaacaatccaacaagtacaagcatactcactttgtgtgtgaaccagcatggaacacaggaaatcacatggagtggacaactactgtctacatgttggtgcttcccaaataatcacgtctacataaaactgatgcactaccaccatagcacttctcccccaaaaaagatacagaaagaatattatatatgttcacatatccatgcttaaagttagagaaaataaccctcaacacttaaagttacagaattcagtctgaaaacttgactgaagtaggatacattccaatctggtgacagtgatatctaaataagacttgacttcatgatctttattattaaaatatttttaaaaatccccatgacagaatttgacacttgagaaatgccaagtttcttaagaaactgaagcaaaatctcctttgcctaccaaaagaagaaactcttagaaaaagatcccgtgctggctttctaggaagctgcctttaactttatactggaagttgcaacaaactctatgacagcttttcctggccgtaaacaatagaccctaaaatcttttgttaatggggtcttggcagatggagttgagcgtcttcaagtcatgccaatattattttgtaataacttaaaacagcagggctttttttctgacttacacagagaacagtgttgcattcatgcctctgtccaataaccaattaggagttttgacatatctagacacatgagaaattgttgttgactagccccgaagccatctgaacactaaattacactgaaaacaaaaaaaactcaaagcaaaaccaaaaacaaaactaagatgcagaaacaggtctgatcaaatcttttctccagaccatctttcttacacagtttctctcaaaatctgccactttccaggcctttcatgcacttatctctcttttcagctgttctcaccaaaatatcctttctttgtttactttcctatacctaagtcaatatttatcacacattcactcagaatccacatggttttcatgttctgtatataattgtttggagagaacctgttcctttctgttatatatggagcttgtacatcagtaccatatttcaacccatgagagcatggagtgtgttctaggagaccctgatgtccaactttcatgaaagcactccaaagacagacaggaggactatagaggcctgacagtgaaatattggtagaggtcaaggattcttaaatggtgtgagaaagtgaagttataggattattgcaatatgtatttcaaatataattaaaaaactcctttcaataaaatataaaaaagaaaaagaaaatgtaacaatgaaaaaagtactttttttgcttacaaaaaaatagtagccatactttgtagaaaactgaaagaaagaaacactccaagaaaaattagatttctttttacacaattcagatataccttcagttggcattttaacatacacccatccattctttatcatggaaaacctatcagttttgtttcctccattggggcctcatgcttaagcacagaaatcagcagagttaatgtagctttctacactatttcatgagtacgtgataaacaaaagctttgaaagtcattctcctagttgattttgtcaccagttcagagaaaataaatggcagagcactgtgaggaagaatgtgggttgtagagctaaagagttggagtctagattttggtaaacaaattagcctcctggcacttagttatttttcctcatgactaaaatatgggtggtgataaagttacaacaataatactttgtggagtgattatgagaatcagacgggctaatctataaaatacttagaacagcaccaccacaagttaaatagtcaactcttccatttatgaaggcttcagatgatgcaatggattatttacttccaagttctgactaggtgaccttaatatattattttcacagttctataatcaacaggattagctattcagatcctcttgtttgaactcagtctctgcttctgatcacgggtgaccttagtgtgtcactggatcattgcttaagtcacaccataagggcatggtgctttgctgatggttcctaattatctgagatcaggaatttttctaacataataatttgatcaggatctcagggcttctgaccttagggatccttctcaaggcctggaatgaataatcccctatatcatatgtctttgataattcttcaatatcaaatgttcaattccatggatatgccctcactttaatgattcttgacctgactgtggtagaaacagcagaagggtaaagggggatgtttaggaaacaacacttccttatggaagatttccctgttttccatcttattgaacttcctaattaaatttctttcacacactttcaactcttgatatactcagaatagggaatctaacaacacttatttatatgctaatttgctacagatacttgtagtctttctcaattcccaaggaacaagagatgttcagtctcatgctttattgcatctactggagtctgagacattctgtacaaagtcagggtgcaaagagccctggaaaacaagcttggtccacagtgccacactgaaccaatggcatcagcaatgctgctgactacccaccatgacctgaagcctacacatgtgatatgtagtctacctatagttgtatgtctttgagtgtggcccaaacagcattgtccctaagtcatataagtataagctcaaaatgaagcctgccaagcaggattttcctgttccatcctttgcaggtggtcaagtttgagttgggcaacctgaaatagtaactttcttgcaacttcctcctaatataccaatgagaatttatgactcttgaggcaggaatctgcattttcaatgaaatcaaattattttattgtatctgaagtttggaatttacaacatagagaaattcattcaggtgaggaaggatgtttaattaaaacaatctaatacttaagagcttaccatcatttttatcttgatgccttagcatgatatagcataatagaactatagaaaatagacaccaccagggaaatgctgtaaccattacagactttggtcttctttgaaaatttggaatactaatgcctgttccagggtgacagttcagcattaaagaatgctgtggtggctaaataaagtcaactatacctacacaacagaaaaatatctaattctacaaaattatgggaaggctgcttatatactcatatgaaaaatcgctccaagaaattctcatggatccacaaggatgaccccagctaagactcctagccatcctggagagggtgcctaaatggaccttcccctttaatcagattagggactaccctaattgtcatcatagaacctacatccagtaactgatggaagcagatgcagtgaagtagacggaagcttgagctcctggagttcagttgaagagagtgaggagggatcatatgaacaatggaggtcaagagcatgatgaggaaaaccacagagacagctgtcccaagctagtgagagctcatggactatggactgacagctgaggaacctgcatgggaccaaaccagaccctctgtgggtaacagttatgcggcttgatctgatggggggtagtggtagtaggaccagggcttatcccaggggcatgaactggctttttggagcccattccctatggtgggataccttgctcagccttgacacagaggggaggggcttggtcctgcctcaccttggtatgacagactttgttgactcctcaaggaagaccttaccccatctgaggagtggatgaggttgagagggaataagggggaaggaggaggaactggggttggtatgtaaaaagaatttttttaaagaaaaaagaaaactaagacctgagaaaaacaaagtgcccatctgcatatatcttctttacatatgaccttttatatgagaaaagtaagggaatgaaaatatatatttgagccaggtggtggtgcatgcctttgatcccagcactcttgggaggcagaggcaggcagatctctgtgagttcgaggccagcctggtctacaagagctagttccaggaaagacttcaaaaccacagagaaaccctgtctagaaaaaaaaagaatatatacttgcattttatttatacatagggaaattaaaagggtttatacaaaaggaaattaaattacagggtcctctttgaaaagatagaaataagtaggactttactgataaaattaagccaaaactctagcacagctttagaacttttcctagtaccaaccttcttggagcaaggaaaagtgtatttaaaggcaaccatctaataattccacttgctaagctctcatccttctgcttagtttggaatataatgagtgctgaccatgaaattattatatttcactccaacagttgccaactgtcttatcactcaaatcagcttggaaatccagggggagctatctggatgaagtgttattatcaaaatgtatcagtaatttgtttctgaaatgggaggaggaaatgtcctacatcagcagaaaacgaaattcgagaagtctgcagcccgctggggcctgaatctttgcagcggggtttctgcatcgattgttgggggctttgtagctctatccggtcatggtgctacaactcagttggcaaggcggttctccatgctgatttgaaacagagcggactttaagggaagcagagaaaaatgccttcacctcgcttttagcttgtggaacaaatctattgcattttctgtaagccgtgtttctgaaattctcttgggccagatttcttatcagacacatttaaaattcagaacaacaaaataatagcaaagtgttttgaaagaacagtgtgcaaaactctgagttacataatatttagagtcaggccatatccatgcaaataacatatttacttttttctttttatttatgtgacttagaaagagggtaagaataagaaaagatattcaactgctgatactttcttttcagtgcagtgattgccttttttttctctttcttttgtgagacaagttctcatacagttcaagttgactttgatctcaccatgtagccaaaacaggcactgggatcctgagtcttctctctctaatttcctaatcctgacacgcaccaccatgtcaagtttatgtggtcctggcaattgaacctagggtcccgtgcatgttaagcaagtactctactaacacctatatcccctgtccttgattgcttttatagtggaagcatcagtcacagtcccatcactggtctaaaatagaagtctcatttttctcaacatagatgtaacatgttcagtcttggagaagctctggacacgtctcttcttcaattcctggtcttataatatgaagacagttccatgtgccaatatggtaactgctgctccaaatgtttactttctgttccaaaagtgatgtcaccctataaggctgactttccaaaagcaaaaacatattcagtgagtgaggtttgcccacacaagagaggctaatggaatttgatcatttttgatataagaaagtattaggatacttagggtcccattagtttttaaaggtgagtcagaaactgctgcctgtctctgatctatgaggcagctggaccaataagatgtgagtgtctgtaaggaaccacttctgagtcatctgtttgtcttagactctcaaacagaaatgttttgaagatgataaaatgcctgcaagttctgaaatgttgctggtaaaagaaataaacctctcttgctttagtgactgttctttgggatgtctccattacaaacacatgctttatgtcttaattgataaagacagcttgatggaagggagtcttctgggagtatagttgtggtgagcaagactggacagggtcccaagaatagaggacaaaagattgttagaaggtttaagctgtgtgtctacattgataaaatgaatattagcctagccataataaccttaaatagtagaaaatctgaaacttacaacgggatttcaacccagattccataccattgatagagattcctagttgagcaagatcacactaatgcattggagttccctctttgtccatggatatttggaacttttagaaagaacctggttcatataaagggaagggactcaacctatttcaggtgtctaggcaacagcattagacttatttggtaccggtacttgattgtgtactaggttgaaagattagaaagtttatggttataagaaaagtctacagagaatatttaattttggatgaaatgaatgtttatttcaccttatattgcaaaacatgagtattttagttctactttgaaacaatttcattaaaggcaacttttacactttgctttttgttatagatggtcaatatcaggactactctttgcttatacagcacagtcatgacaatttttaaaagagtaaagggatcctaccattatttctacaatgcattttatcttttactcatgtatttgcattctcttcagagtaaattcccccatctgtccatctcctcaataggtaatacttactgagcatttaggctatgctagatatcttcaaaagtacttcatctatacaaacaatttgaatcaccacaatccctttaagaggcaggtaccactctagatgaggaacaggaacagtcaaggcactcagctgttgctggccaggagcacacagcacccgagtgttaaaatcaggatatgaaccctggaagctgagagcctattcaagaactcaaagtgattttaaaaactgaaccactatagagtatcctgcacagaaaccagaagaaaaatatctatatctataaatagaaagctaagatgggaagttaggccatgaggatatgaatgaaggcaggagatgaatcaaaaatacaggcctaatgcatgatcccgccttggagccaaaatcttattggtgaacttgggagttgagtcaaatacagaaagtagaatatgtggcctggttctccctacacagtgaatgatctatgattgatgttcaaagagaaacatatcaagtcctttccggcccctcaataaattctgagctctgagcttgaaaagggacagaagtcccttctgtgattagctcttgacactatctaattgctttaatttttctggccagaaatgtagcttctactacagctcatcttccaaagtgcccactgatattttctcgaataaaatttcaaaggaagctgtaatatctttcccctttccattccacacattatcaaggaacaataaaccaatttggttagaaaatttcatttcttctgttgcataataataatgtagtcatgagtctcacttttcaaactgctgactgaaatgtggcattttctgtaacagaagaattaaatattatttaataaaaattccagaaaaaaatattgtgagcgataaagttgaaaaaggaatgctgaatctcgcagcatggcagcctttagaattattttgattttatttccctagataggaatttaagatgttggaagaacactaataaaaggaaaataatatgcttcaatcatataaattattctaatttaaactttcactgctgaaccatctttcatctgtataaagagtgcatttgatcctattgcattgaggctttagatggtggtaaataacttctgaggttgcagcccatttttgtctgcatatgattatgaggcttgtggtactgaaggctgttaaccaaatgattcaatagtctgcacttcactctattggtgtcactatctgaacaggtaagctctatatggttaattcattccattattgtctaaatagtgtacaatatattttttctgtatctgaagcaaatagccaaggctgctattgtagtagcagcatttgctactctgactggaatgtgcataaacaagtcacaagggagaacatttgttaagatacacatttccttccttcaagtaacactcctgttcccaagaagaaaagggtgtagcttttggttcccttgtcagatgttgaggaatcataagtctggggctatcttggcctgtttgagtcagtggtgaataccagaagtgggcttaacatctgaaattgtgcatccttctactagtaaatccttcagtgtctcccaccttgcttgcctcttatctgggaggacaagggaattctacctcacaggttataaaatgacaaggggctatactttcaaatccttcagaggatgcagttacaacagaattccgtgcagtaatttcccagttattgttggcattatgtaaagaaggaacattgatttctaggttctacctctaacatcgaaagctaaatcgcttgtgttaaagccttacaatctgcatttccagtttcctccaccaccaaacataggccctccctaaagagtggccaagggattgggcaaactcaggttccccaggtcagtgtgatcataagtaccatcacttgactgcattcctcacataaccctcagggccatctcaggtaatctttacctcatagagaaattcactctctatttgaactcaaatctctttttttcctttaaattttccctttctaccctaggaaaaactcttcctctcactcatctttatgtagtacacacacacacacacacacacacacacacacacacacacacacacacaccatggaaaggacaaacatacaaaaaatactagagagacattgaccactgtggcctcatggggaaaaaaaagccagcattgtccacataggctctccactgtcctccatctggacgtctccagctgcaggttttgattgtaacctactcaattaaatgtactatttatgtttaattaccctcttttgccatgctgctactgtgttctttaacagaagcagttttcatgtgggcaatacacttttatggaatgtcttaggaacaatccattgcaatgcttgtgtcaggggaggcattcttggctccaaatggcttagcctaagtttaggattcacccttttgctaaaccagaaagagccgccataccgctttgtcttgaactccacataaatcaattaaggtatccaagggacaaaagcgtagcataaatattctctcctccctaatgctaccacagctaagagaccttcccacctggactttactatgtttagctacaaccccatccatgatggaatctacattgtcaacttctagttagtaagggagcttataatagagattaacaataagaagtagatttatttttttctttaaattagaaacaagcttattttacatgtcaatctcaatttcctctccctcccctccacccctgcctctcaccgaccccctatcctttctgctccccagggaaggggaggccttccatgggggaatcttcaaagtctgtcatatcatttggagcagggcctaaaccctccccagtgtgtctaggctgagagagtatccctctatgtggagagggctcccaaagttcatttgtgttctaggagtaaatactgatccactaccagtggccccatagattgttcagacctccaacttcttccttcagggggtctggaacagtcctatgctggtttcccactatcagtctgggggtccatgagcaaccctttgttcaggtcagctgtttctgtgggtttctccagcctggtcttgacccctttgctcatcactcctccctctcagcaactggattccagagttcagctcggtgtgtagctgtgggtgtctgcttctgctttcatcagctactggataaaggcactaggatggcatataagttagtcatcaatccaattatcagagaagggcatttaaggtagcctctcaactattgcttagattgttagttggggtcaaccttgtagatctctggacatttccctagtgccagaattctctttaaacctataatggctccctctgtgatggtatctcttttgttgctctcctctattcttcccctgactagatcttcctgctccctcatgtcctcctctccctcctcttctcccctcctctttctcttccctcccccatgctctcaattagcttaggagatcttgttcctttccccttctctggggaccctcttagggccttcttgtttctagcaagaagtagaatttaaaactaattattggtgatgaaatgttatatattgtttatggaatgttttcttatgtctttacattttttgtgccatgttctgtgttacttcttcaattgatgttaaaataactttagatatcactagctcaaagacttttaaagtatttagccttatacccattcatatatacagaacataaaatgttattaaataagcatctgcaacatcaagagggtcatcagatataccttctggtaattatcttgtttgtttttaacacgacgacgacagtttctatagggagtacctaataggggaatatattagagaaagagcccaggatttaagataagctcattgaatgttgtttcaactaaaagcataatagatacagaagaaatccagaataaatacctaagctctaacaaagtaaataggtaccccaactgtcacccttttcatttttccctggaaccccagggaactcaaggcctgctttcccactgagcctggatacaagatcagaatctgccagctgagaagacagacaatcactttcccaagtggacttaaactttgtaccttagacctgccttgaattcccaaggaggcagaggtggaaatctaccaccaagggctcagtatctgaatgcccaagccaaatgtcttaaagggaaacaaatatggcaatggcactggaactattagaggtggtggctggaccttggcaaagcacagagaaatacacaggatgaagaagacagggagggagaagacatctatttggtctgagagcacaggcaacctgtattttggggtaagggaagagtgtaagggcgccacttttcactgttccctctgatcggcttgtgttcccaggaatttgagccagtctctaaaggagagggtgctgtgtaataaaaccaggccatgtgaggatggtatctctggagggtgtgacctcaagtaagttaataccctcctgggaagctcctttttctgtttggtaaagtgcttgtgtgagaaggggtgatttctaaagtcctattcagcttgcccatccagaactgtaccctttgtagataagctgaaagtaaatagtcctctattaaaaatgcatgttagtcttcccaatggaatgcagagcctggttatgcaagtggcttccatctgttcccactctggttgctgaggaatcaacaacgcttgtccgtgaacccactgtaaagtgatgggaggcctttatgggtttgaagtagctgggaagtctgaaacatcctaggatgcctttccacactccacagactgcccccagtgggctctctgttcaccattggtcacctcctaaggacaggaaggagacattataccctctagcattccaatcttgtcatgagaaggactcaaaaataatgtcatgagaaggactcaaaaaaggaagctttcattctagtggtgggaagttggagtagtcgcagctaagcttcccagcagctcaaaaaccctcagccaaatcaaggcgatatgggcaaatggccagctttttgggtgtgccatgagtgcagctataagactccaccttcacaagggaagatctcttgaagtctgatgatgtaaagttgctagtttgacacattcttattaacttcattttggacatgtattctataaatgctatccagtggacagtggtataaatgccagagatacagacccaggctcaatgccaggcccatctcccattaccttcttgagacagatactttttcaccccaatgcaacctcaccaagaactcaccctctctcagactccctccattggtgatctaaatgtatttacctagtgagcatcccatgcttgagtgggcacaatattagttagaaagttttaatgagcatgagtagtcaagagaaagaccatacaaaggaaagtaaaacacagtttccttctttctgaataagggctggtgaaattttattttgtgctagaactggaaaattatctaattggttatttatgtatgcagtaagcatgggagattccaagtccatctcttcctgagattgcttatggtaatacccactgcatccatgttctggcatcaactatacctctgacaagaagataatcaaagagcaggacaaatggagtcaggggatggaaacactaggctcattgaggcagagtgcgcctcccagcactgacctagtcaagtccaaagacatcctcaccaactcagctttcagcacatgaagctaaacaagtcattatcaaatccatttactctgctttcaagaggatagagagaaattttagccataacgcattaataagctttttggaaagctctgaaggaaagttaatagccaactcatgaggaattctgtggaagtaagtagagagaagcactttcatcatagcttgcctgaattcagcctctggctcttcactcactggatgattatgtataagtggatccctgtcctaagtgttctcatctttaaaactgagatagtatgagtaactgagaattaaatacttaggatagtatcaaagtgagagtcctctacttaaaatcccactttattagcatttctaacaaagcaactagtaacctaattctggtaggctatctagatgaaagtgcctaggccatcgcctgaatattgctatgcatgcatgcacccgtggggacatttaaaatatgagacttggcttaactgcatgaccacagtgcagcttctgaaatgattagcattggtttttccaatcttggtcttggtccagttagtgagtggttcaataagagtgtgcaaatatctgtcctgtgtctacctccctccatagctacacagacctgtagatttgtggacattgaacttaagacagtgtgattccaaataagataaaagctacatatgcctactcacccatgctttaacttttcctagcacagccttctgtccctctacagacataataactatttcaactgatgttgtaaaactatgggggagggaatgttgaaaaggtatacttttctgttcatgtttccatgtagcagggcaagtccttaaacaataccaacttagttaaatcacacactgccaactgaccttcatcaaagtccttaatgttatggaaatatatttaatggattataagcattgatgaaaattttttgctttgcatttcattttgtgttctggagtgaaggtttaatccctaggacagtatgcatagataggcaaattgtgtatgttgtaagaaaaatccagggaaccagtgtaatgaacctatttccctggtactcatggaatattatattcttaacagggcagtataactttactggcctggtctttcttctcacttatgcagaaaaacctgaatgttaaagagagaggatgcccatcgggtacattagagatgagttctaattttgttctaggtgaataaaaggaatctgttttggggttaagatgataagtcacagatcctactgaatgatagttcacaagtacttgtatctcttaccccagtgggtgagaatttagacaagccttggctctactttccaccagctcttgtgtgtagggaacggagtatcctctaaagtaggaactggatatcttaagaaagccttcaagctctaatgctctgtgatcctattgttaggggattaaatgatctcatgcggtctgatcttctgtcaaatcaaggaagagggaatagaatgctactgtggttaaagtgatctttatcaaagaaaataaatcaaaaggttaatagtatatccaaccacattggcctttttaggaagagtgtctcttggtgcttgaagcaaaagtggtaatataaatacaataagctatagaattgcatttctactgtaagagatgggggaatagaaagtagagtaaaacagccaaaacagaacagataacatgttagaagatgtggtgatttactatggagattttgaccttgtcccaaatagtgaagccttaaatccttctctgtgtgtaatgaaacagttcttatttgtagaatactacattacaggcaattcatttcacagaatacatcgagtgcttagggaggtatgtgtctgcattctaagtcaatcaaatgggaaaatacaggattgaagcagcacgtggtcctgtgagaatgaaatgagtcataaaatgtaatcagcatcggtttgataattaccacttattaaatacattgcatgctttaggaactgcatcagctagctgtgttcatcctctcatagaactcttaccacagcacaatggggaaatttaatattcagaaggccaagcaagcaggccaagattgtaggtgtaaatggggagttgactgactgattccaagcctctcttctcttctcccttgtgctgtatcgctgtgttttgtctcaggtgtcaatcttaagagatgcttattctgaaactggaaactccagtagcctgacagcaaactgagattttctaggtggatgagaaaatatgatggacaggaattaatggagttcttattttaataaccgtttctttttttaaaaaagatgttttattttttattaagctcgtgtgtatgtgtgtgtgtgtgttgtgtgtgtgtgtgtgtgtgtgtgtgtgtgtgtgtgtgtgtgtgtgcgcgcacatacttggatgcaggtacctgtggaggccagaaatgggtatcatatttactggagctcaagttacaggcagttgtgagccaccaatgtaggtgctggtaactgaactgtattctctagaatagtattacatatttttaaaaaacaccttagccatatctccagccccttaatgactatttctttatgtatagtttgttgttgtaactagaagttctatacactgaaggatatttaattttatccagtgcagcatgtaaggccaaatgttattactgcatatatatatatatatatatatatatatatatatatatatgtcattttaatgaatccctctaaaaagtggtaaaaattaaaatctgtaaagtgagtggaacaaaacactgaagtaataattagaaatatctaagcattgaaatcctcaatcaagataagttggtagggatccagtctatgggagaaacaaggattctataggttcctccttgagagaaggggagagatgccagtcttggtatggggtcaacactgtatcagtgctgtaccaagcagtctctggacctctcctttgattctcatggcaactggaaaaacagaatgattgatcacacagagacacagatgttattggtctgctggttgtatctaatgcatattaactttcttgtctgttttgttggagagagggtttctatacataattctggctgtcctgaaactcactatggagaccaggctagccttgaactcatagatatctacctgcctctctgcctgctgagtgccaggattaaaagaatgtgtcacaagttaatgcacactaattttttaccatgctatgtacttataaaataaaatacgtgccaagaatctgtgattgctcctgatgttagaaagattaatgacagaatctggcccaggaatacacaaaagacaccattttcttggttttataaaaaaaaaagaaactctacttcccagcaacctttgaaataaaggaccttaaaggaccactgacacaaacctactgctcagagttagctgcttcttcaccaatcagctaagcattccctatcctctaatcagatacaaatttaactgaatgaggatagagacctcaagataatatgtacattgtagataagtgcctgttgctggctgaaggacaataagatctcctcctcctcctcctcctcctcctcctcctcctcctcctcttccagttctaaggatctggagctcaaacacagggctttgtgcatgctaagcaagcattctaccattgaactacacattgagccatactcctagtccttaagtctcccctcctccaactgggtctctgttctatcccattgaaaggcaagacatccataaaaatcagtttgccctctctatctgaaaaaaaaagtggtgactctacctatgaaagttttgagcccagcacttctctatacactaataaggagatgggggttacaatgaatatctttcaagggatgcttacaatgttctacacagggtctggccaagagaatgtgtgtgaggtaccatgttgtagaatattactttaactatgtaaagatgtgttgcttttgtttatgctgcatttgtttattaactatgtaaagatgtgctgctgttttactttgtctgccgaaggcacctggttggtctaataaagtgctgaatggctaaaagctagccagtagaggaacatgtaattggcggttagaaactcagtctacagggataggtagggttggtgggcagagagaataagcagtaggaggaatctaggcttgaaagagaatgagagaggaagagaaggagatgccagagggaacaggaaagtgggacatagagaatgaaagaaaggcaaaatgccctgaggcaaaacgtagatgaagagaaatcagttaaaataagttttaagatctggtggaacaagcataagctaaggccgagcactcacaattaacaaaaagtctgtgtcatgatttgggggctagtggtccaagaaagcctgctgcagtaccatttgtttcactagaagggctctgacaccttgcctctagttgagaagctgggggctctatgtgaccaatcaatccttacaacattaccaaatgtcttgcttcttgttatctatgtctccattgactgaactaccagactcatgagaacattcgaatgctaggcctaacctcgacagttttcacatctctccagtgtcagagaaattaaaaccagatcctcactttttctccgagaactttcaatacaaatcttcctgccactgccatggcttggatctgcaaagactcatgtgttaaagacttgttcttcagcgtgacacaattgagaactaggtaggaagaacctctaaaatgtgtgacctggtgggagcttttaaggttttaagccactggaggtgtctccttataggggattgttggctgtgggtctctttctctctttgcttctaagcttccaagagtggactcactggttctgccatgtattcctgttgccatgtgctgttgcctcaccacaggcccaacagcagcaagccaaccaaatatggcccgaaacacccattaactatgtgtgagaccaaacaaaattccctcctttaaaattctctcaagtgatttggtaccatcactgaaagctgacctagtagacttaccttgtatcttatgactatttgcataccatatctgggctaacaaagcttgctgttccatccctgagcccaaattgtaatttattctcagaagtttgcttttctttgttttcttttctttcctccccacactgtttatttctaatgttgtataccttgctacataatgcaggtgccagttactaggaaaaagctttcatgtcccatgagaaatgaaagctttccttcctcttcccccaactgttactcattcacaatattgtgttccttttattttttaaagcaaacaaagttatttctatttataactgttccaagactggcattttggatgtgtctttgtagaacacagtagtaagactgcctggtggtccctcatgtatttgcacctcactgtttgcctaggtgtgttctttagcaatgtaaaatgcacttgggttaatatgctttcagggagtgagggagtcaaagaggtaggtgaggagagcccaccagtgagccagtgcatgcaaatgtaagctaatttccttctttcaaggagcaaaggacattttaaacataggctattgcacatttaggccaattctgctgagcacaaagactaagaaaacacttataactaataaatacctttagcatgagtacatgtataattgcagtttgaaaaattacagtctgtgcaaatacgaagcaaacaagtattagaaatgcaaatatttaagaacttttaaaacggtatagccacaatgttctttgacttcaaatgttgacagagagagactgcaccttgaatagaccatttgtcttgccccttgtgctgttactgcttctttggtcaggttctgttgtgttcattgtacttgatgctgacctgggtactaaaaatacaactaagataaaccctctacccattaatgaactcttgtgcataatgacaatcagtcacatatgtcagggcacagcaactccagagctaactgtggaaggaaagtcactcaaggcaagccctgaagaagaggactgtttaagtacccaaactgccaagaggacagaacacttaattataactgaaatgagaaaatggatttcaagatggaagaaattcaaactcattatgagtggaacatctccagatggcagaggaggaacttcattttatgaagtaggaacaatgcagagatgtaaacagcagactggatcagcccaatgtatcctcaaaccttgtataccatgttcttaaagactgatatacaatatctttgaacagcagcataatctatagttaataatttaatatgacttattatatagaatcacctgtagttgtttggttaccaaaatactttcaaataacaaaactccttgttctagctctagatacaagtgacttcacttacttttataaagtacaaaagtgcctgtgtgacccaagcaataggctggcatttctaagtagaagcagtagagtttaaaaggcataatgaattttcctcactgttaaccaccctaaggtagaataattactatgtgggtgtaagtaaagtcattcccagatctgaagcagtcattcagtcttcctctttggagactcttcaagcatctccaactttgcaagttacttctagggctgtgggctgtttgagaggaaagagttctacattaataaaagtggtgcagaaaccacaagaattcttggagtcagtgatctggaagttactaggcatggaaggacatgcctagcttggtgtcagtgatgaagggaataaaggaaggaatcatggagtaagctgcatatcaagtttgagggacaggttgaaaggaagcaaaaaagtcctctgggcagaagaaatggcagatagagataattgctaggaagactttgcttagctgtaagttatgtcctcaaaatatctagcaaccattattcatggaataaaaacttcatgttctttctataagcaatttctcacaagtaggtgaagtcttcgtgtgccttttctttgatgatgttcttctgatacaacaggctcaagatccagatccataaccatcttagctattcctcactctgaaccttcattttatcaagggctcctctaagatagttaccttactattcctatttcccttggtgcatatgtctatatctctatacatgtagtgggatacctgtttttcttgttttgaattatgtctattaatgtaggaacctaacagcaaaaggtaaatcattgtctttcaaacttgtcccttggaattaagctcaggttcaagtctggatctggcacttgctcacattatgatcttagataatttgttgaacctttttattcctcagtattaagtgacactaatggctacccaacttacaaggttgccttgaccattagcctagtgttgtgtgatggctaattgtagttgccaattgaaacataaaagggaaccttgattaagaaattgcctccattagatcagcctatgggcatggcagtgtgtctgtagggcattttcttgattgttaattgatgtgtgaggaagggcttatccatctgtaggtggtgctgatcttgtcttttgactctgatcaaataaggaacaatttgaaatatcaaaccttggaaatataatgcttgccattgtcttaaagataaaataattcattcttggaaatgttggcaactttcactacaaaagttggtttctgggtaagtacggaaggtttctcattttagcctctatagttatatttctgctgtttctatgctcagtatttcacacttttggtaactgaactccaagcttcttagaaaccatcccactctcagcttcactcttttctgctttagctggaaaatctaccggagatagggctgggacacataaagcaaacttcagccatttggagcatgactttttcctatgagacctattgattaggatttgtcatagagttgtgaccaaaatctttaaaatacagtttataaatcagcagttgctgcaggcatcttgaatagcaagaggagatcctgactgagaatcaatatgacctgagaaagaataacaaggatcaaacaaaacactgtctatctgaagccaggcagctcctggggttccaactacaggaaccaataagcttcctgtgtgctgtaatttggttgagacttgaatttgctatacttttcaacaatccccagccacacagattgctaaagactgttggaatacatgcccagaaaagacaattctccaagcatatcacagtagtcaaaggccatggaaacagaaagtccaatctactgtgaaaggcagaagtgtataagcatgaccataaattttgtctgggtgcctcaaatttgaaatagcacaataacattggatttcagctatgggaacatgctcatttacatatatttatatctttgtagcatctttgtgtctgtatcacctgatcatcaattgcatctgtctggataaagatatagtcacatcagtttagtggtcttcattctaatggataatgcacctacttccaagatcatgcctcactcatttataaacttcctgtccaatgtctgacagagttactcaataaatcctaaaacaaaacatattttaacttcaatatgaaaaataaaaacctctgttttcaatcaggaatccattcctctgggctcaacagtctacacagagaagattgggggcaatggtatagtatagtgggaaagccatcccctagacttcaattacattggcagtaagtgagtgatatcttctagagctgcacagtgagaaattgagaccaaactaacttcctaaactacagaaaatgaaacaacactaattatctggaatttaatgtgattgctcacaattttgttttcctaaaaacagtaagactgacttcttcaatttaccaagaacaatttctccaaatttccttcttaataataataataaataataaagcatactcaacttgaaatttcagcaactaattctagacaggaatcttagaattttactactgacccaagagtaacaaagacaaattaggtatttactatcttccaactgtgattctaaatgtatgaatatctatgaccaatacagcattcatttaaattgaaattaatattcttgattattattatggtgcagatttttcattaagcattgtaggatgtttctatctacagttagctgtagacattcatttgtttagatatttttggccagttccatttgctgatcatagtgctggtgctaagaatgtgagactgaatggaagacacagttctctcacttacggagattatttctgacatatttagaactaaaacattaattcttcttgtgaaaaattcttattttatgagcttaactgtttctctatatcctttccatttctaagtgttgaaccccgttttacaaaaatccatactattccatgagacatagaagtttagcaagaggaatatactggaggaaacctcttagtatgcagagaaagcatgggttctacaatccagcagcagtgaaatgcacaactagtcaagcttagctttcttttgggctttagaaatggtcatcttaacagggctgatgggagaactgaatgtattaaacacctgaaaactgttcagtgtagtccctggtacagggtgaccattctgtgacacattagatttataaatatcaaaaatcaggttgtgtagcattgaagaaaagctacattcttgtaaaaaatattgatagtcaaataatcaaggcagtatcgatctcattactcatagctcaatgttctactctcagggctcagaaaggaaagggacaaggaccccaggcttcagaaggatcttaagtccactcattgtgctccatctaaaacagtcactctagattcagtataaggaccatatcacccacacagatgactatctacaaaatggactgtaatccaagctctgggaaagacctgggcttttgcctagagtaaggttcaaagggcacagaactagatcccttgtgtttagactgctgagtttctgattacatttggcaattagaacaaaaccccctttgtttccaccaacaaaggattcacttaagtgaatacagaggaggtttgctaactctgttgtcacatataagagataaaactactgtccagattattttttctcaatgaaaaaaaagatggctttgagagcaaggtgagggaccaggactgctacattcgaaagccttgaacagtttccatgctattttgaatgctaacttatgtagcagagaaacagaatcccccccttccaaggtaggagaatttgagaatttttcatgttatcttctaacaaccaccaggacttttcaattgcttgtccagatagctactagagatatagagttgagactggaaattttcaacagggtgatttctcattgcattacagttctcttctatatgatcaaagagatcaatgatttaaaaaaattgaagcgtattcttatgtttttgtttcctgaaaaaaaaaacccacatggttttctctacttaagagttaaaggtatttattcaatcaggataacgtttcaagattggctctcttacttctagaggactgaatttaaatttgagtgaagttaacatttcaaaaataagttcatttacttccatttcaatataaactagtgatcagggagaaatgcaagttcaaaatgatattgcaaatgctgctctcatgcagagtcaaaccagcacacacttgcacctcctctcgggtgatttttcccactatctgtctgtctaactactacagctaattttcccatttctgaaaaaagatggcaatcaagtccatgctcacattttttactgaaagccacaggaggcaagtaaaatgggacaaaaagctaattgtattttagtttcagctctatcacaattgtgtgtgtgtgtgataagtctataaaaaacataattggtactgaaactctaatccaaggttcatgactttagaatgggcattctaactgtagaagctcaccaagatgcatagagtttgggactggggaagtgtttgtggaagtggctacattaatctagctgtgccatggttttaacagtgagttctttgtgatttataacatgattataaaaagaacaaaagaaagcatgtctccagaactctgagagaaagtgaagagcccatgctgtattgtctgtaagcactacattcttctggagagaagtactcccacagactgtcggagagccagcatcatgcctatggacatacatgtggacacacgagtacacaaatttgaataaatggtgaaggtatacaagaacttcaaatgacatttggagttttcttcctctagagtgctagagtcattgccacagacaacttctcctctataattgaacattaacttccagattggttggagtccaccaaatttatatttttgtaatttccatgaggggagagagagagagagagagagagagagagagagagagagagagagagagagagagagagagagatgactctgaatttcaaaagaggtaaaaactcagaattcaatgatcagattttgcctctagcccatctcacagcacatcagtcatttcatggtcccttacactgttctggcccacagtagctgttttcttcagagaagaaaatgagggagaaaacagatcctgtggcctatttggccatagcccaggaaacacttgcagtttcctgagcccttcctggttttggcaggtctgttgtgatttcatggtttgttgtgaatgagactggagggtagacctgctttaaaacatttgtccctttttaataaaaatgctgcataatttgttgaaataaaaaacagaagaaaactaagaaaaagtatgagaagacactgctcataattctaaaatgtattgttatcactttagcttccatgtgtatatcacacacaaagcttaccatcatctaatgcaaatatacacacatatgtatatgcagggcaaattagtcaaatgttttatagtgtttataattaatgtaatgtacttttaaagcatacacctgtaagtttctttatgcattcttctaaacttctctgagtttagaatgaaccactcagaaccttttgataccactgactttctcctagagccaaatatattccccataggcaaaaagtaaaccacatcccagtcatccagcttatgagtccctgaagttataggacttaaaaatagaagaaatggaagttttaagaagccagcaagtacactccagaagggactcatgggtgacaaaataacgaatcaatggttttgaagggcatttccaacagtattttcagcttcatctcatccaaaagacatgaggccttggatttaacaagcagccaaatatcacagatgacttagaagtggagacatgtggcaatggaagggtagttctgtgaaggttctttaagccatctaggattcctaagaacatcttgccatagataaaatggaaggatataaatacatgcccaatacctgcagttttggtttggtgtgtgtgtgtgtgtgtgtgtgtgtgtgtgtgtgtgtgtgtgtgtgtgtgtgtgtgtatttggcttttgcttttatgtcctcttgtcaggagaatgtcacagagcagagatgaatctacagtcagcagcagggcctgtgtaatatgtctatttatctactattagcctctgattacacttggtgccctcaacctaaatcaaactataatgaatgaaagtgaaagacaaccgagaagaagccatagaaatcagcaattcacattgggagcccaatggcattctaacattaatttgtggagtgtatggaaatcgaagaaacttgtttttgctttatcaactagacagagacctttaaagaaagccaaaggaacagatatgttcaggcaaattgggctggcaaacgtttataccgggtttcctggattaaagacaactgcttccatccactcctcaccactgtttatgttgttggtcaacaatggccatgtccagtggtgagtccctgtcaacattgtaaataaacacacacacatttaagtgtatgcagtagtatcagccacatgcttgtgtagcatttattatacccaagatttgttagcatgtagcattgcaaaatcacttttgggacaagatagaaccagatgtctaattgcattctttccaggtttaaatttctatacaatcctcatttctcagaccacacattctgagaactggtttttaaataatgactaattatggcacagttctctaaatgtatgggtacatggatacatttagacggatatatatactctatataggaatagatacatatggacacaaatgtatcaatgtacatgtattcaatccaaacagcagccatatttggctgtatatgcatacatgaatatgtacatgcatcaatagacacatgtggatacatgtagatggatatacatgtacataacccatatacaaatcgatacataatcaagagaaatacgggattctcaaagcccagcttcattccttcattgtcaggaagttttggtttctggaggcagaggtcaagttcaaattccagctctatcatatagtttcctgaatctaattaactaagagatctctaaataatctcattgtctttactataaacaagaatattatttcctaccattccttgtaaatttaaagagtaaataaaataatgtaaatgtataatatacaattgtcagagagtatcatttcgtcaatgtcaactgcaattatctcaactgattaaaaaggtcttgactttccttttcttcctcaacaaaatctttgcagctttagctggtccttttcttttagaagatatgctatcatcgcttattactgtagttaacaaacatttactgtatgcccatctcttgtctttggtacaataaatgttcactaaattcctgttattgttatttgattctaagtgcataaaaatgaatttagagtcatcacacaactgtagcagagatcttaggttgaacctaagttacatttttgtatcctagcatattctatagctcattctttcttcttaccaaattgtacatgaattttaaatttccatctgcctacttgctttctgctatgggtctaaaacctaaatgtgcctctcttctggttgggcatctacctaaagctcacctgctatgttcttttctcttgctcatcctctttaaatagtacactcactgcctcttcttactgctatttcaattaatgaggcatctaatgcctctagtatatgtgtaagggaatgaaccatggataaggcatgatccttgctcttgggatgacttgctaggtggttttcatttatccattcaccccgaccatgcaaattgctcatgttgtcttgttcatcattcctttcctccctccctctatagatactgacaagcaaaataatcaaaagtaattataaagattatattgactggagagagaaccgaatttcaattgtacatataacctaaaactgagatataagggcaaagtacaaaatgtaattgggtggggtaagtaattcccaaggaatctgattcatactcagtcaaggcaccctaaacattggcacatggttacattgtggagggtgaacctccagaaacagctctcctgcaatgtgtccaggaattataactcatttcttcaaggtaacaaacacacccagcaccactttcctcaaggaagagaacacagtcaaagggctctttgtaggccttttgtcccagtttcaggactagtttaatattcaaagggcaaatgtgtcctcttcactttagaaaacttgatgtttaaatacaatttaggtcattggctcctgtgacagcatttccctagtgaggaagctgcatttaagcctcatctcttgtattattgataacaaaactggtgaaggcctgagaaagccaacagctttctctcagggcagttcagaagaagcaattaaatctaaacgctattccagtttcccttttaggggataccaaatctgtgaaagtggagtgccagcatgaatttttcttttcaaatatatttcaagcttttcactccacagcaatgacatgatagatacattaaattttggttagcaacataattattttttgctgtggtaaaaaatggattattttcttcacaaagcaaacaaagctttcctttatgcctctaatgccctgagttaagcagtggagccatgtgccctccagttaccattgtttctctgcatgtctaacgccccttgagattctgagagctggggtttgggttcctctattactgtgttcccatgcctagtccagactgtgccacatgaatgatctctgtaaatatttgttgaacacattttccccaaagaatattttggaatgtttcaaaaatgcaaaatctaaactactgaacaatgtacataaaagccttcccgacttccctcccagcttctgccacaatgcttgttttcccatcccatcaacttcctcagctacagaaacatctgaaagccatccagtgggccatccattcacaccacagtgcctttgtacaaaactttttttctccacctagaatgcccctcccccatcttttaacattgtacaaatcagggcttgggtgtatctcagtatagtgctagcttagattgtgtgaagcattgccttaaatgtttacaaatgtagaaagaacaagagagtagatatgatggcacatgcctgtaatcccagaacttgggaatcagagacaggaagaagatgagtgtgaggccagactggtctgagtaataacaatatttagaaaaacaaaactaagcataaaaatgatttgtttaacatctggacagctccttaatgggaactgttttttttgcccaaggaaaattagttgtttcataaacttctgtctcacaacatctagtatcttggcatgtttttttgttattctttatttgaaatattaggattaattctgtaatttctaccattagttttcaagtcctagactttagagattattatattttcatcttcatgttactaatgtgcaagggccttggatcatcagagatactcagaagtatttattgaaagaataaaattctagttttgaagctggcccagatgttgctcttgcctgataagccagtgcaacttcttctcttgtctataactcctcatctgtagattccactacctgtgggttgaaaatattcaagagaaaaccatcctgtcttccctttctaaatacagactgattttctggaagtcaatctctcaataatgtggaatggcaactcttcacacagtgcttaccatgtatcaggcattctgagcaacacagagatgccttagagtgtatgaaaggggcagctagcttatgggagcatgctagccaattttataaaaatgactagagggccacacattttttttttcatttcaacagcctgaaaacaattcttcatagaatataagggaagacatcacaaatttcttcccttttaccatttatatttaacaggatttatagacatagctttaaaagtttaattagggagttggttattagctttaagtaaaaatattacctcaaatcctccttggcataagaggaaaatgaataaaatgggcaaccactgtggtcactttaaacacccacctctaaattccagttgagtgttctcaaatattacttttatttttccactgattcctgattttatcgaagtagaatcccctaatatattttttgttgataaaataaatgtatttttaaaaatgtggcagttatcttctcttccaaatagcccagcattctgagaaaattaagctttcaaaatggctaaggctagaacatagctatcggcttaagaagcctgccaaataagggctgagattttagaagcgagtgtctagaaaagaatggtcaaatactgacacagtagtgatctgtgatgtttgaaatttatttatagtaggcttaaaacaaaggcctggccaaaacttaaaaatccctctaattatagtgatctaaaacaaatatggaggaagaaaaaggacacactaagtcttacagaatcactctagtggtctaaacataaaagcttaaagacacagatgtaacaaggatgagcagatacagagtgctcccaaagaggaagccaacaatgattattttactagtatttatttccagcagacagcatagtatgccatgcataaggtatttctggtgagctcagtgataagtaggactctgaccattaattaatgacagaccatgctctctgttacttttcttgtgacaagatatctagggacagcaaagtgagcaactgaagaaaaaaaaaagggtttatgttggttcacagattgtagcaggaaagtcatggtggcaagagcatgatatacctttcatggcctcaaaccagtgccacggggataacactgttagattctgctgctagcttgagatgttgcctagatcccttggctaacagttgcaaaggcctccttgtgccttccactctgatcctgaagaaacacttccttagatatttatttttaagcaggagattcctgtggttagattctaagtttaggttctctgttttcaaatgaatttgcatttgcaaaagttggaaccttgaagtagggtacagtaaaggaagctttcaatcccaggactagggggaaccgagggaggtaaaattttgtaagttggaagaggccagtctggtgagttccagtccagcgaaggctgcataatgagaccctgcctcaagcaagctagtaaacacaatagaaaagttagagcctttggttagaagattcttgccctcagtgcattttttcatactgcccccagagaaaggtgtgaggcttctctttaacagtcgcaggtggttttctgcactttgcttgtcctgacactattttcaaagttcacattcttggaatctttcggtgtgatttgctgttctcacttgctcactgtagacctgggtaacagcagtgagcagcagtcatgtgtcatctgaacgttatgctgtaggtctataacttttaaattgggcctcaccagaattctcaggacacactcagaatgtagccagattctcttcccgagtgtcttaagaatagcaacaattccaattcccaaatgagtccttgggttctcctctgaagacatttctcttgatattctgttctgcgaagccgtttccaagatggtccattaagctcttttaatggaaacttttaaagcttctctagccctcttcccaaactcttctacattgttcctgcaaactagttccaaagacctaagacccacatgctcagatttatcatagaaacagcccactactgggcactaatagtctgtactactcttctcatttgcccaacaaaatgcccaacaaaagttacattgagaaaggtttgttttggctcagtttaacagcatcgtcttgtatcatggtgggcatgtcagcaggtcacagtgtgcccatgttcagaaagtggagatgaatattggtattctatttgcttacttgtttgtattcatccaagagtctagcccatggaatggtctcacctacatttaggatgggtcttctcatctcatttaaatcatcctagaagtacccctaagaagtgacagatatgtttcctaggtgtcaggtagaccagtaggattaaccatcacacactttctgaaacgggaagctgttacaataaatctttctgccaaatgccgcctgagccccaccgccacatgtgtgctttacgccagccacctgcccgagttaggcccaaatgaatacacagaagcttgtattaggttcaaagctgcttggccaatgactaggattctcatctgttagctcagtctcaattattataaatctatatattttataagacttatcttatcggacgccttattggcatccctcattgccggtggattgcatcctgccactggaggaggtgaatgggaaaaaggggaccttcctgtttatccttcgcttaaatatgagtctccttgctatgtcacttcctgcctggatcagcacttctccactacatttcccagaatcctctttgactcctagttccctctaacttgctgtctcattggccaaacagtattttatttaacaatcaataagataaacatacacagtagtacattccccatcaggaaccctttccatcaaaactacctctataaattttttctactaacagtaagacacattttgttgctttttataggtaagcctattatcctactcactcaggtacagacaacattttataaaatttcctggggtgaaattcaggctccctttaagggaagtagctaatgccctttatttataatttatagcattatttcagaacagcaaaaacatatggaatatcttttctcatgttgcaaatgctattctcaaaacttcacatgtccccctgtatttctcatgtatttctcctaatcatactgcaaaataattaatattcctatgatccctacattgttttagcctctctcagtctcacattccttatctgaaaactgatatagtataactaattacaaggattaaataagatgtatattatgtcttgctgtttagtctcaatagttcagaaaatgttcattttcctctcttttcttcagtcaaacccataaagtcttctagttgttgctacttttagaaattagcacaggaagctcactgtattagccattagtgaagtacaaagtataatcactgagacatgtgactacatagaattgataggtaaatacatccatatctatacaagtgcacagcaatcacattatgagagtgtaatagtgttattattgtggaagaattatttagttgtttttactaatgtcaaacatttatatcctataactacaattacatccctagagagccaccaagacaaatgaatgcatatgtccacaagtatgtccacagcaacttccactatgagacccacaaagagaaataaaacaaagcccataaacagaaaaaaattctataagcagaaaacccagagacctttatggtatattcctattacttagaatgaaaagaaagacgaaatgaatggatttgaaaaacatcgatggaagaagcctgatgcaaaatgcattcggtatgactcaatttaatacaaaaatcaaagacaaagtaaatctgacatagtgtcttggatagcagcagctccatgtgacgacagggccgaggaacaggctcaggaaaagaggcaccacccaagaggtacaaggccacttgaaaaacaaaatcaaaacagaacctggtaatcaggaagaagatttggagcctgcactactaagtgtcctgggaaagtgaggtaatcactttgggactggctagtttgtgtaccactgttgggctctgtgctatggggtgtgtcctaattgcctggtaatgggacaaggtatggttaagagagaggaatgatgccttctggtgacaaggtcagagagagatagggtgcctctaaaagacttgcatattaaagggaactccctgctgagccgttgttatttaggacaattggctgtccctgagaggtggcagagcctaccagccaggaataatttaaagtgtcagaacaaaataacacacagaatgcttaaaaagtatgtgcatctatatgcacaccctcacacacaaggatgttacaagcctgacagtgctcaccctagacccacagcattgatggaagaggcaacactaactgataatgtacaaagtaatctgctttggcaagagtggttacatacatggtgtaactatgaaaattactgaggttatggtaaaaacccataaatcatgctcaatataaattctatcttgtttcaggaaagttttcttcatgatgcttcactatcaccttgataggttaactgttggaggcattcagaggctactggaggttgtccaccccagagaatcagttcagaactcaagaaccccaaggtaggaaatacacctgcttgttttgatgagtgagccacgtgagggcataactcccttctttcttggtgacaaaaaacctaagcatgtccattcttccttttgccttacattttagagatttccagagccacgcttgttttctgtaattctctgacggccattaccatcctagacaaaagcactttttctacaatgagatacttcttcatgaagcagtttggcacagttgtttggatatggaaaatgagtttgccaggggcgcaaaaataaaaattaagaaagaaaagaaagaaaagaagagaaaaacgaaagatcaatgaagcctccctcccacagtgtaaccgcttcaagagcatcccgctgctgccgaacagttcccacattaaatgactaatgaatttgggttcgcccctgcatttgcacagctgggggaagtggtgctatctacaaagctttgaggcagagggtgaggaggtggcagcattgcacttcaactgagcagcctaaactagtcagtctgctgagtgagtcctagctgtacagcccagttaatgcacaccctacaccctcctcaaaagcagcccccagcttcctgtggctgtctccctgctatgcagccctcagcatttccatgcttgctccccttctgaaagtccctccctgtggggcacactgtcctggacaatgctccctgtctttctacatttcatggcactctatttacccacggtgtcctttcttctttatcttcccacatctgccatttttcaccagatgttggcttccctaaaaaagcctgcctacctttcttggctgtgtttggtgtctgcatctgaactccccaatatggaaacatactgtcctcaatgtccttctctgtctcctaatgccatcattagctattcttgatcaaaggattagtgctttcattttagaactcctaatacaagcatgatttctgatacaacgcaggagattattgtataataaacagcgtggaaagaatacaaaaatgaatggggagaaaaaccaatttcatatacttttgtgttgatggtgaattacttaatgtgtgaaaaaacaatacacacattgaatattaaatttatatgacttttgggcctccagaacaatgccagtaaacacaggtcaactctgattaaaatattaatgatctgttgtatactgaacaactttttgcatgataatttggtattaattgtcataaaatcttatttgtattcagttggctatcatatgactttcaaacaatgactattgggctttttatttctccaagaatacaaatttgggatggtaaattttagtcaactggaagatcacagtgagattcctccagaggtgtcactgagtagccagatgcaaagaatgaacttcaagatcacttagaatgttgtgccaaagcaaatgttagtggattggaaaataggagaaaaaaattaggctcaaaaaaaaaaaaaaaaaaaaaaacagatggaccagaaaaagcagaattgggagactatgggccccataacaatgaaggcaacatacttcttaggtttggcagcacttcctttctagttactgggtatgctgaagcttaattttggaagaaattttttctttacattagtgtgagtaattaacagtgagttatatgatggctaatatatgtcagcctgtctagaccacggtgctcaggtattgggatttggtcaaacattccagatatttctatgagagtgcttttacaggtggtctacaattaaatcacgaggctttgagtaaggcatattacactccataatgtagaattgagggtcagatgtcaaaagtgggccaacctctcctgagcaaggaagaatctctctttagccttctgtctcatcagctcttccaggtaccacagcaactctggcttagcctttcctgcgtctccagcttgctggcttcccaaaacctgaaaccctgaaggtttcagacttgccagcctctgagagcaaaggagatgataattcaaaatgatgcattctcactgttgctcatatgctcttatagacacatacacatacatgcaggcatacataaacatatatgtgttcaccatattggtatgtttccctggggaacactaacacaatacacagagactaaaggtgaaaactagttgctcacaactaacatggattctacaagtacaatttacccaaaagacatctttaattttgttcattcacattgtactatttctactttattatgttgaaaggaataatttatgtttactgaatactgattatagagtatactaacagtacattattaatttcaaaattattcaacctatcattttaatttataacaatggaagactcataatttgtgtcttacccatgatcattttgagaaaatgcttttaaaagtccctaaatgatctttgtgtttccattataggttcatgagagaacttgtgcatgctagctagatctagaagagcatatggaatcagaaaaggctgctaacccaaggcttaacttatttaataccatttccatctaaaaaaagggtgtgactggacctactatagtttttcacaagactatgcccaaagtgctgtgaaattcttttctttttctatatagcaaactaacctgcaagctgaaaaggacttttaaaatgttgaattgttaaaatatttcaccttcattccttgggcatttcagtataatatctgaataatgatatctatggaagaactgggagtatatattttaaagaaaaagaacaagtattttgttcatcacgatgcagttattccacagccttgatctcaataagcatataaacatgatggtggacaaaagattcctctcagcttctttatgaatgagggaatgctatgatattcccattatccttctgtaattaaaacatattacaatggaaattttgacataatcctatacaggtctaatgtatgctgtcatagtctcggtgagtttctatgtgcaccagtcctgttgtgtgtggaagacattgtttgcttggagtcatctatcatttctgctttttgccatctttccaactccacttccgtacagatccccgtgccttatattcacacactttatgcacattgtccagtcatgggtccctgtgataaagaggaagtagacacaaagtcctaccactagcgaagaagctatttgcaactgatacctcttgggaaatggaacaatctgttttctccactgtaatgtcaccgggtatcaacccacactccagagaaggtcccatacccagtagttggccaacacaaaacaaacttcaagcctgtgtgtagaagggatggaaggtggtgggggtttcatttttggcattttgttttgttttattggtgtttttgttttcatttcttttgagagacagaacatgagattgggtaagaaggtggaagaatctggaaagagttggcgggaaggaaaacatgatcaagatatattgtatgaaaaatattaaataaaatgaaacatccaattaaaaatgttagagaaggaagtgacctcatgtcatggatgacaacttgtggtttacagacatgccccacttaccctctgtctataactggtaagctaaaaatacttgttttggcatttaaaattcttataaataatgtcagtaagagtaatattggatggcatttgagattatataaaatttaaatttctgtgctcatgaatgttttactgggacacaattccactcatttgttatattctatcttttggctgatactgggccacagtgtaagagagttgcttgtcacaatacagagagttgattgcctacaaagcagtttcaacagagactatatgatccacaaagcctaaaatattgatgatctggctttttatagaaaaaattcactggccttggtgtaactctctctcattacacatgagaaaacttagatatactaaaggtaaaactgttcttgattactcaaaaatagtttaattgagttctctaattcagtttaatgtctatttgatcacactgaagttaatgaccaaaacttaggtctagttataccaatccttaaattaaattagataccccccatgtaactccctaattaatctcttatccttgctctcaagagctaatgccatgcaaaaaaaatcatattgaagtagaatgccttcatgtactcattgaaatgaactttgtgttgcactttctttgacagttctaattagatgttattatagaacaaaacaatgatacaatttaaatatttcacttgatttatcaatcaaactgacacatgtatcctgttttcaatttggaaagcaacactatggaatgtttactttcacagaaactggtcacattcacttttcttataagaggtgattgacagtaagatgaggaaataattttggtctttctatatttagtgaatagtacttgaccagttaattctctcaatgtgagctgaattccagcctttttaaagcagaaaagcatgtctaaagttagagcatccccttcccaactctaagaaatgtcttttgagagtctagaaaaatcaactgacctaaccaagacttaatataactatcttcaaaaaagacacttgtacagaagccattgtcaccttgggatgctgtttcactgcgaatcttatttgtcaatgtgaggagacagtttcaattggaactgtgaaggctctgctttaaatatgtagtgcatggaaaccaaaggcactgctacaagtcttatagcacagaaggatgaaagctcaggccaggaaactactgagggtgtaaggaagtgctcaaagcataagacacttctgcaagtgtaactgccagacccctcatggtccagccatcatccaagccactgtagagcaaatacttatctgatagctcactctatgtaacattttcatccagcaagaagacagagataatgccacagatagttacatactatttatctagtctcatgtgctattgactttaaccaacaacagttggattatttcctaagaatgttaatctcttccataaggtagataattttcatctatttttctttattgaatttgataaagtgagatttccagttgacattgatctataataactcatgtagtaacatattccaatgcactcaggaaagtaaatcccaaatcacatgtacatctaaatacccaaatatttcagtaggatagcacctgtgttgttatctctagctatttgccagacacacagttaaaggtaaatcaggagaggtcacaataggattgccaatgctcttctccttctaatattactttctaggtactaatatcacagtgtaacacagccaagaaaatttttaaaggaaataagttctattagcttactaaatgaaggactacattcactctaacagaatcaataaattaggtaatttcatttctcacttttctttcagcaagtattactaaaacagacaccttgtctgaactacttagtgtcttcttgagttcatagtcattttgcactgcttttactaagcactagactgactattgatttaattacttaatatttcaatgtaaggaatacataaagtaaataaccccaagttcaaaatatcctttaattgtccaaaaataccaaggtactgtaatgccattctatcttccaagtagcaacatcatgcctcaatccagcacatgacttcatttcctccaactgttacctatgcaagcatagctcatttcacacctactctgtccaaggttttctactaaatgtccctttaccaaactgaatgaaataagtttcctgactttgagaagtagggattggttggggagaaggaacagtgatcaactttataaacatgcaacggagagatccgtcttgctttttttggagatccaggagatagttttctgaactcattctgcttagctgaatgaacagaagttggcgaagagaaggtgtagttcagattttccaggtatgaaaatcacttgtgcaagaagatcagctataaagaactctacaattggagcaacatatgaagtcagaaaagtagaagaggctggatcatgggagaccttacttactgggtcaagaagttcagattttattctacaggacatgaagaaccatcaaagaacatcagacacaggcacagcccagcctcagctcacttgcatttcaaatggaccattctcgggggtgtgggaagggacaatttcaggtggacaagactggagatagttatagtattttgggcctaagaaacagagaggccaaatttgggaactaggaatagacagaagggggcggcttggagacagttaggagaaaatctggcaggactatttctcagattatgtaaggataaaaacaaagcaagacagaaaaggcatcaaccttggttttctagttggagagatctggttcatgagtggctctagcaagcaggaggaaacccaaggcaaaggtgactctggaggacttgtctagcttagcaagagccacgggatgaggcagaagtcagagttaggattatttctttaaggtttctctgtcatcttccatgaaagtgtatagcatcttaagtaaagtattaaactgaagtgctgtcctctcttctaaccctggataatgggctatacccctcctctcagcatgcaaattaggtttcctgtgtgatcccttaagaaacaagtataatagtccttcagtgctctgtgaacacaagaaattacaagatgcagatgaaggatgaacctacatagatgtatagagagatagcaagtgctcagtttttaatgataaaatcgggtactgaggtgcagtactaccagaggcataatttaatgagccaatgtctctttactgactttactgactttccctttgtcttccctgcctttgcccctctccttttctttcttctcttactggcttaactcatccaggatctacagttacattaaatcttgaaatatctttatttataagaaaagaaatacaatagatcaatactgtccccaaactacaattactagttatgtgtctgaaaatcaagtagagcagagccaacagttggagcagaattcccaaatgtacttaaacacaaactttatgtgttctaaaacttaaaggtctcccttgaatgtccagagtcaaatcatgtgcgcaggaaaaagggcagttttgtttagctccactctcctatatataatatttagtagaatgcatcatttaaaagttccatgaatggatttaattttaaatctgaatatgccttttcaaacagaagcactaagtgttctcttctgccccacgcttgtctaccatcactggatggtttggtgactgtcaagtaggtttggtaggaccctggagcctcttgtactgagggcatcagttatggttgcccttgtggggtgctaccaaatataatttcaatctaaggggcacatagaatgtgcatcacaatcatcaaattctacaggaacataacagaatcttaaatactaataccgtctttgagagctctgctcataaccatgtctcaaataaattcaagaagatataaagtacaaacttttatcaatgactccaccatgcataaggaaagacaggcaaatgatcatataaataagcagaaaattaaaggagcgaggacaaacatctcttcagattacgatgctgcattatctacaattcaaagcagggcagctgaactcaatttatttctctctgtacatgatatttcatgattacattccgaaagcctgtgaactgtttacttcaaaccctttgcttccactgttgactaacacaaaatctgttcagcccagatgccagcacatgacaagtcactgaagaaagctcccctctagctctgcttccctcaacatgggctccattcttataagagctttggacaacaggctcactgggagagctagtgaagatgcaaatcacagggcccagaactaggtacactgtaaattctggatgtttgcctagttactgaatcaataactccgagatgaggctgggtaacctgctcttctcagtggctcaccagataatggttaaatagtcttaagatttcatgtatctttcacaattgatgcatttttctgattattcaacacacatttattgaatatttagacttattcatatcgtatgatataaaggaaagatgtaatatagctgtctggagttctggggccagctgaggttacaccaatagccaggagaggatagtcctggaagccccgtgcagaagcaggaagtcaccacaaaaggctgagacagagcttggcaggaacactgctgtgaccccatgcttccctgtgtgaggtggccctggacttggacatcccaaccatttcctccctcatccccatgaccacagatttttattcttctgtctacaatagaggaaacagaacattgcagagcaacaagaaggtttcttctggcctcagaaattctcctcaggctgtctgggaacatttcacccaaagccaagtcacgtggtatggggtacagcatgaggggggccaccatctgaagtgcatcagacagtccccagagctttcagtctggccacattcttcttcctcttaccatttctttctcactttttccttaaaggaattggaggctgatactctatgagatggaaatacaaagctttctttatgtgtagcattaaaattctgtttaacatcacaccttattttccccaaaagaggtattcttcatgtttcccatcttaaaggctcttagagatcttgatccacagccagctctctgggctccctcaccatcatctacatcgtgtacagatggaatgaataggggtgtgtttcattgctggcttgaagttaaccactgatcactactatgattcaattgtgacctcctttaccaagcaaaacctggtatttgcttcttcttctacctctcatagaaaagtttgaagctgggctgtggtggtggagaaaggtggatttctgtgagttcaaggctagcctggtctacagaatgaattccaagacaggctccaaagatacacagagaaaccctgtcttgaaaaccaaaaataaaataaaagaaagaaagaaaaagaaaagaaaagaaagatatgaatcttatttgtgattggaagactttgggaaatcatcttaaaatacaaattgaaagttgggtgtggtgatgcaaggccaatgtcagagtgagaccctctttcaaaaacataaataaaagcaaaggttgaaatgattctctacataattttttgttgagaacttgagatcactgaggctcagttcttttctggatggaccaccatcattatacagtacacagaaaatctctttgttcaataagatcttgcttcagaaatggtatgatggccatgggataacttaataaggaaatacagagcataaaacttcagcccttatctcctagtggaatcactgctctcacaagtaattccctttagctacccaggtaacattaattaatcctaatatataaaagtcagaaaggagagaaaaatagaacaattactagctgaggttcaaaagactgggctgcaaggaggggacattaattggtgaaatgatacgttattttaatgagattggtgatgtcacgttatagtaaataacatagacatgataccactctaaatgtggaccatttacttcaaagtctctgcttcaataggacccacagtcaatgagatgagtgagacagagtagcacagtattgacttctatcccaactaattagcaggtgactcttctttctagctcatcaagaggatcacaaagtaactccacccttatttcttggaacctttgttcttaggtcctggggacttctgtccaattagataccaaagatggaaactcaaagattattccaggttattcccaaagacacaaatgattaatgtaacatgcccctatttaatttacttctattagtttggtcttagctcaagttcttagaaattcttcaggtctctaatcttgctgttcattttttacttaaccatgtctcacaaagtctgattctgaagccagagtatacaatactgaatctggcaatcacctcactgcaaacatttactatatctatctgtttttcgataatggtctaaagcattttctttgtagacaagaccctctgtgctttgaatctcactattatttcatttctgttttccactagaatattcaatccttttaacccaaatataatgtgctcttccattcccagggagaatgcagacatcaccaaagggcatcaccatggcatctcttcaagactgaaatccttcattttaaaaagaactccatgttacaaggaaactatatagcctcaaggtcacagagctggatagaaagacagtggaaattggacacagtagttagacttacctttcccaaataagattttatatctgtgtttaaaagatttaagtcagatctgatggtgcatgtctttcatctcatcacttgggaaagaggctgaggcaggtggatctctgtgactttgaggccaatctgggtgtcatagtaagttccaggacagttagggttacatagagagaccctgtctcaaaaatcaaaagagagagagagagagattatcgctttatgtctgtatgttgtgtgtgtcatgtatctatgggtgatcatagatgccaaaagaaggcagatccccagggtctggaattggaggtagttgtaagcctcccaacaatagtgttagaaaccaaactctggccttctggaatagcagcaagtgctcttaaccactgatccctccttttatcctatttttgacattgctcactcaaagcatagcattattcaatataaagtgtccaaaatctttagagtcatgatgatcagatgctcttgattaacaaattgacataaatgtgttcggtcaatgtgtgtacatagctcttcctttcgctccaatgcaacccattttccagaagccttcccttcaaaaaatctgccaagatttcacttctaagaatactctttgccctaaaaataatcttcaaactcaacacaagttaccaaaataaaatatcctaaataaaacaatggcagagacagacctgataatgaatatgaaatatgctaagaacattctgtcactgaaactaaattcacttttttgtgtgtgtgattaatagtaggatgaagtcttgaaccacataagaatgaagcaactacagcagaggataagtcgcctggaaagggtcccatctaaaaggcatccatttcaaagcagctctgtcttttggctatcatcaccctgggcctgtccagacattcatttccaagtgctattttcaaatgcggctccaaatgcagaatgagagtcaattggcatgttcaaaatttgctttggggtggacagaacaatgaaatgttttcaggaggaataataagtgcattccaacacttggctgcgtttaattcatgttttaggactgtcttctcttcctaattccttagcaccccatttccaccagaacatggggaaataaaaagaaattatacatgaagctatttctgactatccatatggcactgaagtaagttaacaaacaactcaatgaatgaataaataaaaaaataaatactcaatacatttacatgggaaagaatgaaaaaagaaatcagcttgaacccaagctgtcagaattgatgagtgatctgcatttaactagatctaatcaggccatcaggccccatactacatttcctggcaagtctcagggcatgtaagagggcacagcatatcaggacagtggaaagaggaacaaaaattacctgttgagttggagattggctttgttagctaagggtttcaataactcccgatgctcagagagcctgtccaaaaattaatacgacggtggtagcgtgggggaggagagtggagtctgaggcaaaaggatggcagagagcagagagtaagtaagagactgctagaaaaaccattattgaatatttaatgtttagactgagacaagaagaacatttaccaaagatgcaaattatgcaaaaaattgcttccagttttcacacagaagataaaagcagtggaagaatgcataggtactaagcagagcaaaaatggggccacaataacccagaggggaaaacacacaccattgtgttctcgtagatggtacatttgctcctactcaaaagcagctgggtggtctagtggtgggcacagctgccttccgaaagaagttggtatttctgcctaaatgttgctgaaaggatttggcatcgctttattttccttgtgagatttctgaaatgtacttactatctgaagtctcgtggggtagctacactctccaatgcacagatatcatttcgagagaaagttctctaatgaaatgcattcccccttctgatgctgcaatcagggaaaggaagctcactaatgccctttattagatgaagctgttatcaagcaccacattaataaatggcataaatggaagggtggggcaggatgaaaatgcaagcatccgtctcctggctgtggtgtgtatgtgtgcatgtgtgtgtgtgtgttcaattttaaaagatgacagagttcttctaaaagtaagtaatctatctcaaatacaaacttctctcctggctttgtgatgagtatattaataatagtttctatttttaaaatgaacactaatgaataatgcattgagtattcattaataatatatacatatatctgttaagacgagttaaaaagcatcactttgggttcaagccagtgaatggaattaactgaaaaggtagttcttattgcacatgggaccaaagaacttcactttctcagtcatagttaatttgccaaaacattctttttcctgatcttgatcgactactaaatctggagggaaattcacactcatttgttaattctctggcctcattctttttcatgccctattacacagttgcttcaatacagccaagcatgcataagtgtagaaacctctcccactccctatgcccccaaatgctcttccttccaaatattccttgggaagcaagtcattgccatgacaaccataagataaggtttgaagggctcttgggggcacacttggtgaaagttaataccagcttgtgttttacagagtcagggaaactgagacaatgggtcatacttgtcattgaggcaccacttagttatttagatctgtccacatcaaatctaaccagaattccaccttaaagaaataaaaaaatcagagcggtgtattcagggctgatccatcattctttcattgtagcaaattccctctatgctcactagtaattaaattaaaaaatcatacataataggaaaaggagaattaaggctttgccttgcctggcaaactttaacgtgaaacatcagccatgagcgccccaccccccaaagggttagcacgttttctttgctaagcaatacttttctcttcagcaccttcacacacagtgcccttccctgccaggcaggtgatgaaggtagattcctatggacttgtgaggacttttggtgtcttcaatacatttgcttccagaaacaggaacactggacgcaactagcaactgcaactcaggtgtagtaggaatcttttgtgtaactcgtgagctagagaccggcttcctccaatgcatgcgaaacaatactttctcacactgactccagtccaaagaccaagagatagaaatgatcatgcttttaaaaagtccctatgtgataaggttcattctctctttgtctatacctgactgaccacctggccagggagattttaaagtaaggaagagaatcctttgttctctcaggttccatttaagagaaagtgggtcgaagggcttccccagggaaagaaaatgagctctggagccaaatgcagactaggaagagatttcatgctcactattattctcgtcttccccaagaagtgaattcattctttggcagactaatggttaagaaaggtgggggtgcacacaggtagccccattactgagaccatatctaattccctagtgaagctcaggccatccttcagggtgggtgggggtgggggtggggtaggggtgttgggaactctctccagccatgggtaacacagccagaactgcatgcattcgcacgccccaaaactggcgtcccagcccaagtgcgaagttgggcgtttagacctgaaaagcacagtaagagccattcaaagcagcaagttacagtaccttgagaagtctgacagatgggaggaaggctgcgtggcatagcttcctgatggtccaatttaggggtcgagaagcatcagtctgattcatgaccccttccaaattccaccgggaagacaagagactgaaaatctgggcaatgcctagaaaataaacggccccccacggccctggcatcccatggtcatcacacctgcaaattccattagggcagaggcttcctggaacttgggagtctagtcaagtggcgtttcctgagcccctgaaccttcttaagaaagccacctcccctctccctgcagccgtgctcatgcataccaaatgtggccgaatggaggcacactgcctgctgcttcggggaggggatgcttgatttcgaaggagagggacagcctgcacaaaacagcctgtggtcggagtcagagcagcctgctccagaatgcgcgctccctctcccgctctcctcccagcaaacgcaggtcaggcactgggggggaacccgggccatttgctttgctctcttgttttgggggggagccaggaggagagcaaaaaggaacaaaaatgaagccagaaggagaacttgtactttcttgcacaaagcatctttgaggggctggaaactggcgcagggggaggggctaggacactgggagggagaagggatgcctctgaatgataagataaatgcttcctttttgatttgtgtgacataataaattgagagctatcgtaaaatggatctatagtaaaaggagatccctgctgtgttctggggtcttttattaactgtgattgacagtcttcaccctgatacaagcaccatatagatgatagatgagtagaggctgagtcaaactcacacatacacatgctgggaacaaggagttatccctgttgtagaaagctttgcaaaagaatgcattcgtggattaccattttagcaatagtagtttctaaattgggggatatccctacaagacagacctcttgcaaggaagcttaacccttaaagtgccacatacaacactgtccacagaagatggtttcctcaagtatttcccctcttcccaataatttttcaaggatgctttaagaaagagtgtagctgccttggggtaaataatctgtaaagctcccatggtgaaaaagaataaaagagaacttttccatctaaaggaagacattggacaatttcacttagacgagggctgggaggggtggctgtgtcatacccctcagctggactgcccacccccaaaggctttaaactttagtggtagcattgaccaaagactctgcccaggagattcccacaccctctcccttcaagcattgccagggtacttaaaacttcccacttcatttccctcccagcgactgtagagattttccatttttaattaaccagaagaaatgggtaatcccccctcccatgactgctgtgaattctgggacaaaatccagaggggttagagcagatgtgatagagatacgaggctgcattttaggatcaagaacaaagaacgtggcagacacctgacacctgcaccactgcaccatttcctaaagtgctccagagtcagagatgcagaggactgcagaaccactgactgcaatggaagaatccctgcatcaggttaattctattaaagcagcatcaatttaacagaactcacacacggttcattttctgtcaccatcctattttcataatgggtgaaggacattttaaactgttaacaagctagggtgtatgtatgtcaggcatggtgttgggcatttgacatcctataaactcacaccaatggcagccctccagagaagttgctatcatatgcctgtttcacagattgaacaaataaagtccagggaaattagcctggattcgagtcatattactgagctgcaaagatatgctttctgctttgtttctttcacaatttgagacaagaataaaccttcatttttttctggcctttattctgatgtaagaattgcaataaaagatggaacaagagttcagaatgtccttcacactgtgctgtggcatggcactgaggttcacttagcctccagaattctaaactcagagttcagagtttagaaatcctgaccccagccttgggcagttttctcatctcccctgtgaactggagccttttatctctaaaatggaggcaaccatacagctatatatccaaggatcttgtgaaatgaaatgggctagtgccagtggaatgctgagaccagtgcttggtccctcccaagcccctgctaccatggccccattctaggcaacatggaccacaggcacccactgacatttttcattaaggatactttgtgtgtgtgtgtgtgtgtgtgtgtgtgtgtgtgtgtgtgtgtgtgtgtgtgtgtgtgtgtgtttgcagtaccaggtagtgaaatcaagtgagacaaattaaacctggatgttttctatgagttatgcagagtttagtaaatgatgtaaagaagaaagcagaagactgaaatggcagtgggacttcccttagccttttcttacagaaggctagtcatcagattgcaaaacttcaccttcagtgagcctaccaggggccagcattttttggctactaaaggcccttaagtggtttcttctcagctgtgagaagtcagctccagtgacacataggaaaaaccattacagttgctcacccttgccccacactgtcccaaagtgttaagaacaacacagaaacgaaagcatcttcctgaaaccacagcttttgagcctcttagctcctttaattttttaagaataactttggtcggaaacataggagttgtgtgaaatgagaagggggaggtgtcacatcctctctagaggtcattagagggaagagcacaaaaccttcagggatttagaggctacacagcaaaggagatgaagatcaaaagaatgagtggcttaagggggcatcctcccgtcactggagtaatttatgccagggttatttgctgtcataaatggaaagaggggttttccaggaccctcctcatttttcatatagaatgagttcccccatgctttcagagaggaccctaaaaggaaaatcagagaagaggaagcttggctgaggcagttaatggctcatacatctacaatgctcattttaactgttaagattgtgagtgtttacaaatctaaatggtcaaattagttttcgctattcctaaaagtagcaagtgggggttggttctttttttttttttcattttaaagcgtgtctttcaacatatttccaatctcttttatactatgcaagcttctttcccattggtcatcttttagttcagtctcagagcagttactaagtccttacatagacagtctatgttttatcctttaagaccctctctggaaaagtcaagacactttgatagaacagtggatcacactcagtcttcttgatactcctttaatatagaggagctaatttgaaaacttaaggacacagggaaggcacaatgaccaggtagattagaatgtacaaaccatggtgtcctagtttgctttctattgctatgaaaaacaccatgaccaaagcaacttggaaagggaaaggtttgctttaaagaggcagaaacttcaggcagtaacctggagtcaggacctgaagcagagaccacagaggaactctgcttatggcttgctcagcccgctttcttgtataattcagaaccatcttctctggatagcaaagtgtttgagaattgtaagaaaggcttaggaagcagtattagtgagagccgagaagacagtaaaatcttcttctataagttgccttgctcatggtatgttttcttagcaatagcaaagtaaaaagacacacatccggacacaaaatgttccaaagtaagttagtgcattttgttattatcattgaaatctttgggtatttgggcattaattggatgtgtatttcaggagcttatttttggatatggtctgcatagggctgataaacctagaagaagtattaaagccagacaacagtacatctgtaagtattttcctccacttcaaaattctttagtagtcttaacattctgcttacttataactggcctcaacccatagttgtctcttttcttttttaaagatgtgtttttatttttgtgaatgtgtcacacgcacgcacacacacacacacacacacacacacacacacacacacagagagagagagagagagagagagagagagagagagagagagagagagagagaggagaaagcccagtgctgagagatgccataagacaactgtagagcccaaggaactggtacttatgggctgtcgaattatgggtgctgggaacttaactctggtcctctggaagaacagtaatcactcttagctgttgagccatttctccagccttcattgctttctagtgtcctgccagctcaatagttttgtcaaaaagatcatttttgtagtgatcattatgataaattacactttctatctgaataccatgttttttgaaatgtttcttttccttttgattgttctcagagctataaaattttaggacttctctgatgtttctacaatatcctttaaaatataaaatttcattgtagaccccactgatttatgatactgttatttattaattccaaatatgttgttctttaaatagattacgtgtatttcttcttcagttaaattatttttccctttggaattcttttatggataatagactaagaaatagattaaactatagtgaaacgaatcactcatttttaaactagcctaagaaacatttatttcatataaaaacaaaaatgattatcttttctacagcatcaggttgttttccctgcctgttcctgaccctctgcataaatgtctccagtgacatggactgggagagggttttttttttttttttttttttccccgagacagggtttctctgtggcattggaggctgtcctggaactagttcttgtagaccaggctggtctcaaacccacagaaatccacctgcctctgcctcctgagtgctgggactaaaggtgtgtgccaccaatgcctggcccaggtgaggttttgaggcagatcattcctcagttgggcagcttcaattgtcaggacgttcctcctaaggcagtggtgaaatgtacctccttctgacttcttaagtcaagttgtctttccaaggccagtttcccaaatgcctttctggactgtgctcaaacatacttgtgtaatccgccttttcttcacagtggacaatccctcttcacaccatggcatgtagtgcttagtagaacaccctcttcagggtcataaaaattcagcctcttcaggggcttcattcaatattgtatcatagagttacttaaaatatagtaatgttttaatcctcttaaatcctttttaaatacttctcacaaaggtcttttgtggagctttaaggaaattcactaataatttagcctcttctgaaattttcattagtaggcctatgcaatgttgactataaataatagcagttccctcatacagaaaactgacattctctcttttgcacacacatagagaaggggggagggagggagggagagacagacggagggacagacggagggaaatacagagaggtggagacaaagagaactggcctgaattgatgagtatagattcctcttttgaaaactttgtaagggaggtagattgtaatgggctaatgggaattctacactgatagtgggaaagcagcctttgtgtatcttcatctgatagctctgaagttagattcaagttcctctgctttttattcactacttagacctgaacctgctatatcagctattaaaaccttggtttcttactgtagaaacagtgtccactatactgtccacatttatattttggaaaaaatagaaacaattatcacagcattaacataatgaaagccaaaaatgattgctattgctatttacattattaatatgggttaccacattcagtggctctgactagtagtttattccattgattaagatcaaggacttggtactcaatggcctggacttatatcccagttttaccatttatgagatgatttgggaatgtcacttaatcttatggcactttggtgtcttatctgccaactgaggataataatgatatccacattaaaagaatagatgcaaaggccacagaagaggatcccacctgttacccaggctcaaaaatagtagcagtttgtgattgttctattgccactgctccacagaagcaaagttaataccacaggaggaaattacatttagatcataaatggggagaacaatgagtgatctcaatgcatgctaaagaatagtcaaatgaaaaatattttaatcgggggaacatttaaaacatctccacctctccctttctctttcttattcctgtaggaggagccacttcagagacccagaggataaagatacacacttgacttccccaagagcttccctctctgcaagtgaaaggcagcccacatttatgaataaaatatgaaactaatatgtaaaaatgtgttactttgggaaattaaaaggtatgtaaacagctgtgtctcactgaaaataaaaaaaaacaaatatgttaagtgacatatatatcacacccccttctcccaaggctcagggatcattgtagaagagaaagtggaaagagtatgcgggcgtgaggctatgaatgactgactacaaggaagcattgtctttagaacataggacagctgtgtatataagctcaaagcagctgtgatagcctgaacaagacctgtgcaaagccaagccagaagaaatcccagcatggagaggagaaataggcatggagtcgtacccctagtggaggtgctattggcaactggtagctgctaggagaagatgagttggtcttctccaacagtaagaccctggttaagttaatcatacttaaatagaaggccacacaaccaagaatatttgggcagcacaaatggtcttgatgggttaaaaaatattgaatgcatagggaagggatgttgatctgtgaggagccaaaggatcgaggtacataagatcaaaacaccttatatgagattctcaaataaccaataaaacattgtttaataattacactcacacacacagtgtacagcaaattacaaaggccaggagctaaaatacattctcatttagctttgaaatcctattacttccattcacaatggggatgatttttttttttgcaatgattctaaggagccttgttaaaaatgtaagaatttgagatgttcatttttaactacttcatagtcaaagtttcctgatatttgtgctatttgttattgcaactcttctctcttttctaagcctagatatgtgcactgcaagtgtgtacaaacggtaacagctctgaatagaataccttagataaatttgatatgaaattcatcagccttaccatatcggtaatggactctggagttaatacctgtgaggtaagaagacttaagcagttaatttcaattcctgcttgaaggaattgtattggttgaagggaaacacagaaactcattgctagtagtgcagtttaggaaatgttattagtgaggggatacacaaacatggacacattcaactcaaaccttagacatactccacagtcatcctcggatgctcactaacctcagctggaagcttatcccagccacacaattggtcttgtgcatcttgagcctctgatgctgatagccagccagcatcacattagaacataaggtctgctcacctgggaaactgagacatactgtgatctggaaaatcttcaaagtggtggcactgcttgggagagaattttcatgatgaaagctaatgaaaattgtacttattgtacttgctatttatttttgtcattcttccagaaaacatgtcactgtatttattctgttatcttattttcaacaactgtgagtcttattcaaagcagcccaggaattagatgattttagtcagttggccagttttgtattttgtgttttattttgttctttttacgaaggggattaaaatcaatgcaaactacatgaattttgaagtcagggtgaactggatttgaaaccttgttaagatacctgacaattaacataattttctaagtcacaaaccttaaaacacacagggctgtaatgccaaagtgattgacaacttgttgagtacttgttgagtgctgccaacaaaatgtgtgatgtaccaagagaagatcttatgcctcttaccacattcaggaagtttgcagcattatctcaacattactaatgaaagaacagtctcccaagtcattattccttcaggaggtcttgtgatgcaaggtatactcaaatctagatccatctggttctttaatctatacttttacctattacaaaatattgatggcaattagaaaggaaaaggatgtaaataaagttcttctgactccccataaagaaaccagcgtttgagctcttgaacctgaacagagacaaagcaatgctggagaattcccctcaacaccagaggctcgacagcatagctgggccacaaatcattcagtggctctgactttattttcattgttgattcctactctccttccaactacagttccagggggtagactgccaaagggagcaaagattgtccttactcatttggcatgcccaatatttatttatcagctgccttccaacatggtacttattaaatggaagaagatgttcctacaggatttatatggtaggtttactttttcctacacatgtacaattgtttaattcttactactatcaacttttattcccacctacactttctagatgaggaaaccggtgcttaaattaaaagttaaatatgtataaaagctcatcctgcaaggttaagatccatggtttttaaatattttgtgagttgggtttttttttttttccatttttcgagacagggtttctctgtgtagctttggagcctatcctggcactcgctctggagaccaggctggcctcgaactcacagagatctgcctgccttggcctcccaagttctgggattaaaggcatgcaccaccaatgcccggcctattttgtgaggtttaattatgtatttaacaaaatccacttttaaggcaactgaaatagtttcagacatctagctagatatgccattccagatacttagaacagcaataggtggtttcagccacgcaatgatgcacttgagccaaaactttatgtctatcacataaaaatgtctatcacagtaaaaatcaaagatgtctaaacacaattatgataattattcaagcttactttatttttatataaggcattataatagaaaagaaggataatgttcctggagggaactttgtgcaatagttgttttgataaataatagatagaaatgaaactttcacattaaggttcgggcaaaataatggaagaggaggcagaaagattgtaaaagccaaaggaccaggacaccttgacagacactgttctaaacatgacaaggaagttgcaccatgacatctaaacaatatggttgcttaaagaagatctgaataatgacaacaccagctgacatgacaatgtggacaaggggcattttacaaggtcccatgcctagatgaagagttatagtaaatcaatagttactgacagagggaaagtaaattttactaaggaatgactattgtatagtttatccaatccaaagtggtcaatcataagtaatatatgtataaactgtgctaaatggaatcaatgggaatatgcatatgtatatacaaaatatttatatgtatttgtacatgtatgaaatcttgaaattgagtgggagtcagggaaggccactggaggggttggaagagagagaggcagaggtataaatgatataaatacagtactcatacatgaaattctgaagaaattaatacaaaataataggtagataaagttataatatatatgccttttcttgtcccttaatcaaatcacatgcaagtaaatgcatggttacccaacaaatggaggaatgattaattccattttataaagctatgtaagattttaaaagataagtcaagtcactgtcgtgagtaaaaccataatgtcctctctatgggattgggagacactctactccaaatcttggtttttcagtattgagactcactgattctattcatctcttcagccttaactctggaccattatcaccattcatcatacttcaatagcccttatttcttttagcttctgggtttcttgtcacaagactattgtgtgtactcttctctgttctgccagagcccctccttctggctcctcaaaggagtggctctttttacaaggctgagagctcagcttgagtatgatctttgagagtccctccagtgcatccccagcagctcctcgacacttactgaatttttctctctgaattcttttctactttttagaatgtataactgtttaaatggttgatttacttctctcaggtccccacctcctacttgagtgtaatttcttgaggacagtcatcaatggtatactagatcacagcagagtttctggagcatggtgtgaagtcaatcaaagtctgttgactccagaatgaacaagtgagaataaatggactaggcatacgtattataaccatttctttcaagttatttagggtagtctcatgctgcatagtgtttattaacaaactgaaattttcttcaggctcttttggcttaaaagtctaagaactgctactaaaaattaatgaaaggaaaaacctacaggctctcacttcaactacagaacaagctctaagcacagaggtacttgagaaacagaagcaaaataagcaacaggaaactataagcaatgaaatctgaaataactcatctgaaagaatctagttaccattcattattccataactgtgtcatacatcgccgcgatgacaattcagtatgaggcatatatcttcatgaaagagagccttattatatataaatgcaaatctctactcaaaagtgtaggaatagtcacctacacatcagcagtagcaaccagattcaataataataatgatgataatgataataatgatgatgatgatgatgatgataataataataaatatgatattgattcctcacaagtatattatgattccttacccagaattatgctgacatgttggcaatgacaatgtaattacaaacttagttttgcagatggaccaacaggctccttgaacatgtcttgattgaccctgttatcaatagcttcactgcctcttgtgccttctatgaggctctatgtcttctttatcataaggctattcttagagtgaactatatactgagtcttctttaaaaatataaccttcagaaaaaaattaattgtctacatagtagcataggtacaacttaaaatcatgagattctagaaaagaaaaaacaatcgtgacagaaaagagagtcatagttgccagcaattgttaggggagatatctatcaatgaaaaggactggaagaatcttctcagagtgctagaaacatttgttttttaattcagttgccaatgctcagcttcagccattgctagaattcagcaagctatacacttacagtcgatggatttttgtatataatgagctagagaaaacatattcattttccctcttattataatatgaaatttttattgttgaaaagagaaatttaattacctatgctatggtttacatatttaatggcatcagaagtccatgttttagcagttattcatcagtgtggccttattaagaaatgatgagactatttagaggtggaaggtaattggggtctttgggtcactgagagcatgtcttgaagggaaaaccaagagcccagatttcacctctatcttttaacacagttatgtggtaagtgactttggcccgccgtgaatatctaccatgatattttgccaaaacaaacaatgtcaaccagtcaagaactaaaggctacaaacctgtaaaccacaataaagcacttgtcattataaattgtttactttaggtatttttgacagtaacagaaagctgacaaaaaaaaaaaccccttacaattcctgaggtgcattttggatatttaatcaagtatttttgagataattcatataaagcttatcctgattgtatcactaattaatatataaccttttgaatattccaaaacatatcaaatgtttacatttgaatcagtcatgttcctcagtagacaataatcagtttgcttccattttaatgttataaaaacttctgtaatgaatgagtgatgatacatttttgtgtacaactttttggtttcattgtaaagacacaatttaagtcaagaaaagactacactttgatagatattttcacactatcatataggaatgtataatttcaatgctcttcagcaacaaataagaatgacttattagtaaattattgataaaacttggaatgtaatttcatttctggccaagttgataagagaaaaaataaatatatgtatttctagtttgcaacttataaagctccatttccttatggccatttgaaattctacaaatgatttttctattagtttattttttctcattaaatcttgaatgctgtttttatattaaggatagtatcccttgtcataatagtctttccagctcaagtttagataaaagcttgagtatgtgtgtgtgttctttttaatatctatcattgagttttaaacattagatttccttacttgtattttgccaagccacagcccatattttgattctttattataggctcaacaaagcactgttgtaaaaattttccaatttacaattccgaatataaagatttttctgttcaatgataaaaatctgagatctatccccattgccggaggtcattaagagcattttcctcattcacaaatactatttccataaatggaagaatcctcaggcctaaaaaaatacttttatcttggcctgggtaaatctaatccagtatcactccatgtgtcagtcatctggaccacagaattgagtggcaaagtgagtgagtgctgttgaataaatgtaacttaaattactgagtttgccagaatctcagtcactagagatttttgaagatcagtgcagacactgagtcctctggatggaaagccagaaaacagagaacttgcatttctagagctatctacttggcacagaaccagatgaagacagattcagtttgagaactcacttatcattcccaatggaaaaatattaaatgggtaaaaggttcacagataaagaactcaagagcaatccttacaaatacagccttaaaagaatgaaagtacccaaatccaaaattgctagatcaattatgataattttcaacatagctgaattattatattagtacttcctaaagcattcacttggaactaaaatttatttggatcttaaagcacagaaattcctgtaaatggcattttctgttggcaccttgcctgtaaaatagtcacacattcttggttgcccttgagcttgatagttcccttaattttatacaaattcttccatgtgttactttcaattttgtgcatggggacagaggagagggtgagaaataaagccatgaagacatcattgaatagcatagaccactctgaaaaccaaagcaactgaattcttgagactatcccaaggaccagcagggtagacatggagccgttttagtctgctcctctgggacttgggataacatcataaaaataagtgtggtattgatattttgttgagttaataacaaagttaatattgtttttaaaatttaagaccaattctatagatgtttctatccatttcaaatttgccacaaataaagcattttcacattacattttttaatctataaagtgactattgtcaaatacttagtacagaatctatgtaacaagacatccatgagtgttaattcacccagagcattaccaaatatacccaagcatatgcatattttcaggcaaaaggaaaataccagaaaattataacatcttttattctcttggtagattaaaagtcatattgccaatgctttcatcattagtacaagcaaaattgcttgaaggccaacagaggtatatatcttaagttatgacaccttgtttgccattcttacagcatgactgtgtatttaatactgtatcaaatttatgaggacaccatttaaatgtgattccatttgtatttactattccagatagataaatgtgttaatccagctaacttctgagtgtttgccatgtatataatcagccaaaatctgataatacatagagattagcacacagtgctcttaaggatgaaacatcaaagtaatttagttgaggggacaggaaattcacacatcatggaaaatcaaaaatcaaaacctggaggtgagagtacaaaatccttagctactgactcaagaaagttttatgccttaaaccttacttcggagagggactgagcaatatgtagaaaacaagatgactaggcttaccctatactctactgctcaaagtctctaagcctggagagcaatactatccatttgttaaaggaaaatgtgatcagctacttactcatctacctgagaaaaaccatgtgattagaactcagatcatcagtattgatacttttcatgcctatttactttccaatgaacccttctcaggtacataccttaatctcctggtaaggaattctagcatgtttaatgttctaaagatttttctggcagtattgtagtatatccaaggaaattcaactaatttcttttctcttttcatcttgttgtcatgctaaaatattctgaacaaaatcaacttagggaaggaaagcattggcatatacttccaggttacaatccatcattaagggaagcaagggcagggacttaaggcaggaatttggaacagaaagtatggagaaacactgctggctagctcattgataggctcttgctcagctaattttttttttatacaaccaagaccactttcctgtggatgatatcaagcatagtgggctaggtagtcctttctaaaccaattaacaatcaagacaacccccctacagaggcgcccataggccattctgacctaaacagttcctcagttgaggctttcatctcagatgtctctaggctagtggttctcaacctgtgggtcacactccctttggcaaatctctatcttcaaaaatacttacattacaattcataccactagcaaaattacagttaggaagtagcaaaaaataataataatttgatagttgggggtgggtacatcatgaagaattctattaaagagttttagtattagtaaggttgagaaccactactacaggctgtatcaagctgataattggagttaaccaagacaccatttggaccagggagcatgttccttctcttagatatactctttggtccaatatgcactaagacctgggagtatgctcctaggaggagcagctagaagatgtgaaatttctaagccatttcatgaatctcaagaataaggcaagctcagacatggaattgggatgcccaagaaagccaatgaagtagaaggacccaaaccatgttgaatccaaaaggtggttctgtttggcaaagtagacaaaattgagtgttcacaatgtttgaaatggatggtgggaaaagatgccattgaggtttataagtactggaattaaatgtaaccaggaatgagatggaaatgaccttagcaaactcagtatagctaattaacagagctcttgcctagcaacaacaagaccctgaattccatccaaagagatttaagaaaagtgaaatgcttttagaaacaaattggagctagcaagactaccaggaagaaaacaaaccttaccagctgaaaaaaataaacatgagatcttcagggctcaataaaaagcttttctgtgacctaagctggggacaggatttccccagcagagttgaggtctgcatcacaagaatgtgctacataatgtaaagagttaattttgtgatgtggcttttctttaaatctaactttcacaaatgactgaaattcacagagacaaagaagaaaaagatactatttcatagaaatcagggttaaatataaccgttttcctgaccttttacagacaaaagctactccttttgatagagcttctcttgtagagagaagatcaaataaaagactggtgttctaataaggatcaagtgaacagattaacttttaacttgagcacttaaataaatattcaagacaagcttgctgagtacagcagtaacatggagaaatgagttctgaggacctattagagggcttatagacaataaatctagcaattatgccagccttgactctgcaaaaccagctgagcaattacaacaattttatctgtttccttgaataaaaggtagccattttcttatttctctttaattttccagactcaacacaaagctttgaaattgaatacacacctgtttctcattttgatatgccacctaaggacttaacatggaaatgactccaaatttctgcataatatccaaaaggaagcttcaggcttggatgacacattttaagtattcttagaaactaatattttaccatgcttaaaacattttaaatatatgttgaaggaacttttataactaacaatagaaaatggcactttgcagagagaaagtattaggaatcataaaaaaatgaagcctagccacaagcccattctcaagcctgcacacctggtctctcttcctctaatccctctacccaacccctgcttaagttcctactggttcctgggtatttgcacccccaagaatattgatggcatacatctcaaacaaccatgcatatgtctgattgctctcacatatgaatagatttttttcaaagttattatttggttttctacataaaactatgaaaacatgtttttaaaattcttgtttgtttagttggtttatggctaaaggccactgacactgcaagaccaccgtgatttgcatatttaagaagagttctaatgcacagaaaaattgcaaaagccagaggatgaggatgtctatggtgcgattgtgccttctagctaggacagggaagctacattcatgaaatcttaacagcatggctaactaaaaaagaagacctagcaataccacttttggacatatacccaaaggatgcacaattataccataaggatacttgctcaacaatgttcatagcagcattattgtaatagccagaacctggaagcaacctatatgcccatcaactgaagaatggataaagcaaaggtgcaacatttacacaatgaagtactcagtggtaaaagaaaaaaaaatgtaactagaaaaaaaaaaaaaaacatcctgagtgaggtaactcagacccagaaagacaatcatggtatgtactcactgacaatcaaaaatttgatggaaagcaaaggataatcaggttacaatccacaaccctagagaaactagataaaaaggggtatcctaagagggacacacagggagggctccaggaagggaaaataatcaagatctcctggctaaactgggagggggggttgaagggagggtatggggggtgggaacataagggatcaagaatacccagtcaggggaaggggaaatcaatgaaagagatatcttgatagagggagccattgttctagagaaattctcaggaatccacaaagatgaccttagctaggtctcctagcagaagtggagaaggtgtctgaatgggctttgccctttaagcagattagtgagtatccaaattgtcatcattgaaccttcatgtagtaactgatagaagccaaacattgggctgagctcctgaagttcagtcaacaacaggaaggagagattatatgacaaggtggataaagagcatgacagagaaaacgacagagacagctgacccaagctagtggtagttcatggactatggactgacagccggagaacccacatgggaccaaactaggccctctgggtgacagttatgtggcttgatctgttgggggtgcaggggctggtagttgtaacaggacctatccaaggggcatgaactgcctgcttggagcccattccctatggtgggatgccttgctcaaccttgatacagaggggaggggcttggtccagtctcaacttggtatgccagactttgtagactccctcaaggaaggccttaccctctatgaggagtgaatgggggttgggaagctggggagtcatggggtcaggagaaggggaggtagggggaactggggttgatatggaaaacagaaaataattttttaagcaaaaaaaaaaagaaagtgtcaaaaaaagaaaaagattgggatggtttcaacaacagtgaacatcccagtgtagatggtagagatctcaccatgaggctccatacaagatcattctgaattggtcatctaacaagaggtggtcagtcctagaaacatacacatataggcaactgaatagtctcagcaaattgtatttatttattgatttgcatatacatatgtatatatatcaacaatgattaaataataggggtccggaatttgggagggagaggaggtgggcatggagaaggtaggagggagaacagggaggggaggaatgatgcaattatattctttaatctagttgttcccacacagctgagacttctctcaattctagaactgcctgtgcatcctttgaaaatgaagcagacacccgtaactaatcatcgaactgaactggaacccagatgcagagaaggaccactgaagagcacagaggtccagacaaggctggtgaaacacacagaaacagctgacctgaacatccgggaactcttgctcctcagtctgatagctgggataccagcatgggactgatccagaccccaggaacatgggtttctgtgaggaaacctcagaaatctatgggacctcctgtagaagcccagtatttatccctagcataggtgtggcctttgggagcccattccagatagaggaatactccctgagccaagacactagggggtgggcctaggccctatcccaaaggatacgatgatgacaccctatggaaggcctcaccatcagggggagcagaaaagatatgtgacagataaggttttagctgtgggtgggtgtagagggggacgggagggagaagggaactgggattgtcatgtaaaacaattctgtttctaattcaaataaaaaaagtaggaaaaaaagaaaaaaaaagaaaagtaaaaataaataaataaataaaaagaaaatgaaatcaccgtgactatggttgtaaacttctgcatttgctctttcattttgttgactttatgcccatatcctttgctttgtagtatattttgatttgaagcaaataacaacaaagaggctctttaattttatggcataatggacttggttgtagtttttttttttttttctttagtcttttctgatctccagaagggacctctcattaatactgattttgtttacttctttgatacccttacttgattccttgaatatataccactttatcttctccattattctactttctcaccataattcatgatctaaggaaaataagcagtgtcctcaaagatgaaattgatgggaagaatatattggatgatgaaatttcctgttagctagaggtgcattgaaatgggtgagcagcaaggtattatctcaagaggtttgctgcaatgaaaatttcataacttatgaagctctaaggaacaatccaacctcaatgcttgaggccacattaaaagtaattgaaataaatcctcagtcattttaattgatactttaggaaaaccgctatattatttgtcattccctaaaacaggaacaaactacttttcatatctggaaatttgtgctaaagacagtggcggtagagatgaaggaagcaccgaaaagaatagcaacagcagtaatgtatgaaattataaagcatttgtaaacatatgtttgctggaaggaactggtctactatcccataggaaacattagcttatattagaatgattttctttaccgtagcctagagcaatgaatcatgaaagtagcaattaaatacttttgctgtgccaagcacaatactagcaataatatgccccacccaacagttggcatacatttagtttggctattaaattgccatcttaaccttctttttgctatttatgttgtcagggaggatagaaaaataagatgttggtttccagggttccattttagctagtgctagtcaataagtgtgtgtgtgtggggggggggaatggtactaggggaggagtctttgttttaaaaagaagtccccagtccttgttatgcccctcattcctgccctgcctatgggactatgctactttagggtgcagcatctgatgctatagcaagtgtcttgataccagaaaggggggaccaagagtcagatggaaacctctcagcctaatgacatcacacatgcagtgggaagccaagttatctcatgtcatcaaatattttattttatttaagccacagtcagtttttatgttgtaagtagtggaatgtgtctaagtaatgaattgtgagtgagataagcattactctccaagttgtacccctggggagtggcagagacacatttggacccacaaaccatgcatctggtgattcagtccttacatgcaacacctttttattctgaaggaaatgtcgtgaggtttgaaaagcttatctctcttccctgcctcatcctcgtaatttgttctaaccctagcctttctctccacttcccttccctcagtgtaacatcctggcattgctcaagatttggaagttcataccattcaggaatgtttaaaatattttaatggcacagtatcttttaagccagtagaaactaaacagtcctcagtggttgcttcaaattgaccttcttttgataagatgaaaaggtagattattgaatttactttttataagcaactgctagtcttaaatattttacattgatatggaatattgtaaatagatacaaatttaaggtaaattttgttaatcttgttcaaggtattgtacctaaacagctcatttaataatgtaatgcaaatttctagtccttaaaattattattatgaactatttaggataataaagtaatgcaggttagctagtaatacaaacttatagtcattttaggtaaaatttcaaggtcaaacagaaattattttcgatagacaggtcatcttcaaacacttaggaacacttaggcgatctatagaatatggcaatggcatttaagatgttttaataacacacagtcctttttatgacaatgagacttgtctgctcctggcagcaccaatctacattggagaagatgataggcattgaagaaactttacatggagtttactttctctgtggcaaaagtaagccactgggcaaaaattgctcttgcctcaactgctgacagtatgttgtccaaattgaactctgtgagttcaaagctaccctgggctatacatgagattgattcagtctagcagagaaacagagccaggtggtggtggctcatacctttaatcccagtatttaggagtcacacatctttaatcccagcactaggtaggagtgatatcactggacagagagaagaatataaggcaggaagagacaggagcttttagcattcagtctgaggattcgtagggctagggtcacccctttggtctgagtatctagtagaggtaagaggtctctcctatgggtgactcctttacttctctgacttttcagcatacaccaatatttgactctcggtttttattaagatctactagaactttgctacactctttcctttccccctttctacatcccttcccctccttcaactacagagcacctactgtaccaggcattacagatccaaccgtaaagtgaaaagactatatccaaacagtttagccacagatattccagaaaatatctatattaatggactgcaagcatgcactaccacacaatgtacatttaaatgtaaagaagctatgatttttgaagaaagaataaagcagttggctgtgcctgaggaaacactgggattcccaaaggggtttttcagatcagacatcatcataatcaaatcaaatccatctctatgttcaaaactggccagatgaccttgatgtctagtttatttgccatgtgttcattcatgtaaaaaatatgaaaaagatcatgggtaccctgtttttcatatccagatcattgaaccaggtgtatctgacatgtaaaatacataattccacaacaaactgagtgagctagattgttgtcatggtctttagtttttggttagctacactgaggcatcaaaactgaattgtggaagcgtaaaaatgactcagcatctaagagtgcttgctgcatgaccatggataccatgagttaggatcctagtacccatatgacaagccaagaatcttgcaaatgccagtaactccagctccccaggatcccatgccctcttagcacctccatgctcacacacacacacacacacacacacacacacacacacacacacacacacacatacacacacacaaacacacacacacacactcagatgaacatgcacagctgcatacacataaataaatgaaagtcatctttaaatcttaattcataacaaccaccaagcacagacaaaaatgctgagtgtgtatgaaagctggattttggtagttaaggataaaatctaactcaagaggaccgtaagaagccagagctttcagtttttcatttaaggatgagcatgattcctttgtccactgactctgactgagtatgttcttttactgataatttcaaagtagaatattcttggaaaactcttactctaggttatcaaatttccttgtatcatttagtagactaaaggggcttttcaaacaggaatgtcttgagctagtatggtattatgtacaagactagaacatctaaatcagaaataaataagacaccattgaaacacaaagtccctgaacaaataaatttattactagttacaatgcattttctttatttcatacatagactaaactatcttttccagatgcaatattaactcgtgcctatagttacacagttgtcctgatttaagacctcaatcactttgacatcagcttttgatgtcccatgaaattaacctgcttcctctgcatgaccattttcaatattttgttcctgtacttgatatgttttgatgcttctgaaagtctatttatttggtctataatgcatgcagaggaatatctggatgtctttacattcaaactgagttttgtcaaactggtagtgtttcaattttaaccttcatgttatataaaaatgtgtgaaatgttgagtttaacaaagggcatagacttgtagtaaagaaagcagagctctttttctgtttcttctgctcatgactatggagtaggcctcaatatttctggattcctgatatcctactgctcaagtaaatgactttggctagacagcttcccaaagcctcctgtgtaggatcactgatcagcttctctgcaactgcctttcttatgttttattctccccaggcaaatcttaaagtgggggtttgcacaccagtagcactcagtagttgtttcaggaagcacagaaagtggtggattgagactggaaaagagaaagaatcaagggagtgtgttctgggtgtgccaccacagtggcctggacgttcttattgaagggttgcacgggaacataacttgctccccagagttatccccgccaaactaggcaggtggggatttctatgtcagttccagttagtgattggttgtgagctgctgtgacaggatcaggggatggcagtgccttcagttcacctacatttgcagcctgctgtatacatagtgtcctcaggctagaggatgctctgaagtacagatgaagatgggtggagttataaaatggcataggtgtgctgaaatggcctgaagatatagctggtccctgagcttcagctagtattccaccctccctctaatctatgtggcagttacatgacagttaatgtttcagattagctcccgtggcacatcctctgggcacctttcccatgtctgagctctggtggcgttcccatacagtactagtcacaatgctcacacatcttctaccaaacacaaagttttttctatctcgagcctacagtccacctacatctatttgactggtgcttttgaataagcttgtggttcttttggagaaactcaaataaaagctgtcttttatttctcttaggaaacagaatgcataaatgaataagtgtttgtgccaaatagctatccctgtctctagctcttaaactctttagacgtctaaaacagtagagtagttgatgctgatattgtaatgttactatcaaatttatagcagcaaaaacttagtggacaatgatgtttaaaaattcatttgctcatagcaactctaacaggcatgttcctggatgggcaagttctacaaaattctgtgcagcatggcatttttacccatgactcttcatgttttcattcatatgggtaaacacatatgcatatgtatacacacacatttcaaatacaatatttctgtttttctgatatattttagcaaactgatcgcctatataatatagtccgtattttatggacaaccctatgaataagaaaagagaaatgagaaagttccaaattactcaaggtttgtgattctaaacctctgtgttatccaggtttgatactgtgctccagcaccaccattctccatccacacagttattttaaggagatctactccatcactattgtttcatcttgttcaatcttacctactcattaaataaataaataaataaataaataaataaataaatcctttccaattcccttccatccaactctttgctcatgaacatcctgacttaggtctggttctaaacatacatcctctttgcttcttaggaatcagcaactctttgcttctaatccattgttaataatgggtgcactgctcttaagatagacagaatatcatcaatcttggggattttccttagggggaggtaagattttacttattctttgattgggccaattagcttcctatgagctccctcgtggattgttctaattctaacatattagaatgagtaatattctccagttatatataaacctcatttgacatatctgctggaaggaggactagcaaaagtcagcccagactgctgatcagttactttgacatacagtttaaactgtgccccttggcaaaagaaaaagttgtgaagaaaacatttaaagaaaaaattagcagcaatagtcttaataatcctagtaggagtgaaaacaaacactgtaagagtttttgcttaaactatactacatcctaaaaataaatagtaagttctttataatttgatgaggtgaaattctgtatgcatgtatccatggtaacccaggtttatatttttgagctataaacactagtgccaccagaaatatgtaaatcatatgaacagatataataagatagaattatgtttccataaatatcttttgggtaatagttcaaaaaaacttgacagcagatcataaattatgaagtgttttaagtattatttttaggaaaactagaaaaatgtttatcgatgcaattacattgaaggcagagtagtgtcaagagccatatgctgtcttctagagtaaggtcaaagggctgtgaaagtatgagaaaatatgcattgcctcaaataccaaatagaactctatcaggaaatctgagaggagtgcttctccttagaccttagacattagcaagtgtctatggccaaggaagactagaggagttaatatgggctttttatcaatggcagcttctcacgttgcctttttccagttataagcataactttctttaaatgagaggcttttaggctgcactctagaatgctcttagaaagcagtaaataccgtgacattgctctgcttttacaaagagactctgaagccctaattaactgatctgtagccttcctttgctttgctgtgataactggattctggaggaaagaaaatacaagttctaagaagaagggacagtgcagacattactagtatttcttttcccatgtagaattctattttatttctgatggtatttaaaatattttgtatgcagagtaattctctctatgattataaattgggcatataacaacatgggcatataacactttttcagggatatgtttgctatgctatcagttctctaatcagagaattaatagaattctatctttgtgtatttggaaagggaagaagtgtgagccagctatgtttgatcttctaggctccttcatggacatccttcattttcaattcatctacacaatgtcatggtggaataaactcagctttctcaggcttataagtgagaacaattcagcttccaagtaggcccagtgctgtcctctcttgctgtctggtcaaaggccccagatggccatatgcattttagcagctggtcctgtactcctcacagtaaataatacaccacaggagaaaaacaagaatttgactcttcaagaagcagtttgttcccatctgtttgttactatcttgtgagtatgttattctaagattaatattttttctgccatgattgtccaaaaaataaatttcctttctttccattataccatctgtggtcatgtagtgggttcctctgagggttcaaagtgttccaacatgcaccttggattacaaaatagccacaacctgcttcccacttctggaaagaactgctctgtcctttggacagttgaatgtgctgtgtatccatcaaactatcctcaacaagctggcttatacatgccctatggccttatacatgccctatatagctatactagctataatgtgggaatgaagcaaccaatgcagagacagatccagagatgctgtactattgttcttggaggaacattccctctgcttcctgtctcctccatgcccttgtgcatattatgaacattgtgagatggccttgcagaagttgagccttcaacgttatctaacaaaccaactctgtcaataagggtaaggggaggatccattgttatggaatttttaactatgtaaaaatgtgctacatttgtttatgctagagaatattactttaactgtgtaaaggtccattacatttgtttctgatgcctttgctaatggtgtaaagtgatgggagatgtccttctgggtatatgtttctcttattagttgatgaataaaacactggccaatagctaatagaggtaggaagataggcggggctaggagatgagaagaatgctggggatagaggcagagaggtgcctcaaggagacagcaggtagccaccaaaagactaacaggtccgggcattctccaacaagccaagaccatgtggaaatacatagatttatagaaatgggttaataattaagacagagttagccgataagaagccctaggcatcagtcaacagttctataattaatatagcatctgtgtgtttatttggggctgaagtggcagcaagacttggtgggataggaaaactccaaatgtgttacatttgtttatgctgcatttatttaattgtgcaaagatgtgttgctgctacaccttgcctgcttaaggcacctgactggtctaataaaaagtcaaatatccaataactagaagagggataggcatagctgatggacatagagaagaagaagagagcaaaggataaggggagtaacacaccaatggccagaagtcaggcagctgcctgcctgccagtcagacacaagaagaagtgaaagtaggcagaaagaaagaaagaaagaaagaaagaaagaaagaaagaaagaaagaaagaaagaaactccaaggcaaaacataggtaaagagaaacagattaagagctaagataagaccaagcattcataactaataagtagtctctgtgtcttgatttgggagctggttgatagccccaaagaaaaagcctgctataatccattcctttccctgcccctgaagattaatcctctcccctcaggaaccagggaaaagaaccactggctctggaacccccttgcttgagcttgatgcttgcttgcagaagacccactttatgctatttcttctaaagcaattttttttcttatcaactggctgtgtggacactctcaattattttgttgagtcaccaggaaattggaagcctgagcaattgcagagaccctgtagtaacaatacccatttgctcagcatcttgaaaaaaaaaagtatgctttttcctgaagattttaacagcttgcagcctttcataacttattaatatgtcctcattgaacaaatatttgctcaaatactatctcatgcaaatcactgcctctaatcgccatacagaaaaactgagcaaagttatttcctgccattcaggagttcacaatttattataaacaataattatgaaaataatgagcatatatgtataattattacagtattctgtgtcaggtacctttctaagtttgttactcacatgacctcatctagacctgctgaaaactacttacgtcattcttgttttacagatcctattaatagcttatttaaagtcacatagtcaataaggctctgggttatttgatgtctacaaatccaaggtttataaacactttacacaagcatttaacataaataaaggaataatttgatttgctttcatactgactaaaaatatatccaaaaagaaaagggtatgccagaggtgtggtctcttggtcatgcacacaagctggccaccgtcttctgaaaactgacactggatatttaccaagctctgaagtcagtaactgccaaatacttcacaaaattccccatcagtttcagatacttgccaaaccctcacagatctgatttttgattttgggagtaaagaggtgttttttattcatctgggtttctccagttagtaatacatagcaaatgttgagtttaagaaaaggaatgcaaatatataccatctcttgagctgtatctttgaaaacaggaaagctcagaagctactgtgagattttatagtgtctgggaaagcatgggttaatttaattctgttttaaaatagctgtgttaaaaatagaccttggcacctttgagacagaaattccatatgtgtactacataaaatacatatgatctatagtttagataactatttctttttaatagtaatgcaaaatatatatcctaaccactaaatactcctcccttccccttcatcacagtaataaaataggaacttgttaagaaaatgttaatggcaatcaaactcagctgcttgtcctcacagagacctgggcttagcagcttcctggagtcctgtgtagatgtgaatggaatctcaaaggacccagactggacactgaggggtccttttaaaccaatctccagtcagaacagaaatcaggtcaagacagcattttgcaattcagcctatttaagcgctctcatcacaaaacagactgacgaaatagcttcatctgttgtcaactgatgacatcacacaggaagtgatgcctgcacctcacgctgctgggagaagcagccggacacaaaggccacacaggggagcctaattgcagtaaatcttttaaccatcttctcattttctagggttctagaaacagacaccctttattctctatattggtaaaaactatacagatgaagaggcacctcacggaggaacctaaagcttatgataagaaatgcagccagctcactctcaggatagcacaagctccctctcatagtagtacactttcctcccacagcagcacacactccctctcatggtagcacacaccccctctcacagtagtgtaaactaactctcatagtagctcacattccctcccatggctgtacatattccttctccagcagtgtaaaactcggtgtcagaggtctgggattcactcagaatcttctgtgctcaaagggcttgggcacgcatacttctctggctctgtccatcaacaacattaatcatacagattgtctccgagactcaggctggctctggcatctccaaactgctgaggacttctgctgcagctggcctctaggttcatgaacagcctctcttgggctctcttcgggggctctgcccctgtcacatggggctcactttctttccatggcacctttaatcttcacatttccactttgactgcggctgaaccgtctccagtggcctctcaacagtgtggtaccaagcctcaggatctctccatgaccccttcaaaccctgcagctctcaggttgcccaaaccaccaccagccaaatgagagactcttacacattaccaagtcaggctaccagcttaagatgcaggctttgccaccccacccccttttctaaacaatagctctgtgtgttgacccagaggaaatctccccagaagatttcacctcaataattttgatctcttcttactcactgctgctgatctctcagccccaggcaaatagctcaactgtcccagtaaagtttcatattagtcgttctggttaattacagcaattattcagctccagctgatcagaaatcacatatatgtaattcaaaacaccattcaaatggtcctgatagagtattggagagaccctcaaacttctcttcaaaattttacaagccaggcttctagcatctgaattgctttcaacataccaatcctctaatttcccacagaacagctcatggagctctaagcccttgatgcctattcaagtccaaagttcaaatatccctgacagtgctcttcaaaaataacatggccagatctgtgactgaattatcttacaacctggtcccaatttctgtcttaatttgtttttgtttttgtttttttgttttcctactgctataatacaacattctgacaaaaagcaagttggagaggaaagggttaatttcattttacagcttacatcatgaagggaagtcagggcaggaactcaaggcaggaaccaacagaggccatggaagaacacttcttatagctttgttcctcgggttcacataaaacttcctttctgatacttcccagggatgacattgcccataatgctatgggctgggtcatttcacatcaaccattaatcaagcaaacatctccacatacttgcctacaggtcaatcttgtgtcaagttgccaagaaaaccaatcaacacctggataaagacctaaaagtttgatatacgtaagtgaagttttttgttttttgttttttgtcttctacctctagtgggagtgtaaatcgataaaagtgctaggaatggcaattttccatcattaccaagaacaaaataaggtattgacctaaggacttagcaattttactactagaaatttattctactatgtgcttacgataaatcacgcagcacattcatggtgatattctttgaattgttaaaacattagaaatacagaaaacactcttggacatctgtaggatgttaactacttctcataaatcctgataaaggaatattatgaattcacaaagaagagtgagagtactctgtgtgtatgaatacagagtgagctccacgtgaagaaagaataaatatttagtgtttctatgttggcaaaggcactttatgagatcttgtttgaagtatctgtgattctttactattttccgttaacaggtaaaaaatgcattaacaggtgaaaatttcacagtaccaaatgcacatagtgctccgctctttccttctcagaatacacagaggaactacagcttgtttttccataaatctatgtcatagctgatttcataatgagttctttagaaatccagaaagaaatcataaataaacatagttatatgtcctttgtcacatataagactgtgaatttcttgttggtaagattttattaccaccaacttgctcagaaataaactataaggggaatgattcttagatttaccacttagtaactagacttatttttcaagtcaagtccactgctaaaaaccaactctctatgggagttacatggcatggatcctcaataagggcactgaatgccacctcttacaatgcaatgacctgaaaaacttccgcagaattgctacttgtgaataaatcggtcactaaactgcatccaacccaaaggatatagttcagattaaaaagttctaaatttcattaacctgggttattagcattcagtgaaaataacataaatatgtgagatttttataatttcagcctgttactatttcaaaacactgacatacaaagaagagagatcccgtgagagagaagtaaacacggtttgtcctcatattgatgtactcacacagcagggctagctttatcactgccccagaaggttgagccatcatggggcattgatgaagtgctttgctggctgtattagctcttcttccctttagggctgtggttgccctgtgaatgactgtgtgcactcatccttatacataaataggaccctctctgtatcaagctttgagcttgacagaaggataaaacaactatgggtttacctggctgaaagtattcactggccagatggctgctgagctgataaataaggtcagcagaatgctcagcttagaggactaaaaaggagcctcaggagccaacagtcaccagtgatacagctagggtagcatccatgtgcaagttcacttactttgtaacactgtgagttgacactgccaatcgactgtggtaaacactctcccactgagcccatgagatgcagttccacaagaacatcacataatgcttcattcctaggtatcagtaacggtgtttgacacagagagtgtcctatcttaattactctttcctgttaattgggtgctaaactgaaccaatactatgccagtaagtgccacgttgattaagggtaacattaaaatgttataaatgttcactcttccttattgttgatggcttggtacactcctctgttccttccaccctagctcctatctctgagaaattctacagctaagccaaagcagaattagggaaaccccatctgtctctttatctaggtgcctgactcctggcttcagagtgaaggtatgtccttaaggaccaaccttccctgctaatccatgttttaaaagctggtttccagtggggacatgaatcctatgtccacaaaatgtgagccagtatgtataatttgcacctccattttcccctgtaacagagaaagctgacttgactatagataatctaatttaagatatattccttgaaaatctctgaagtgttttgcagtttgaaatgtctattgccatcctgaagctaggctctgttaaaatactagaaaaaagatattttttttgtcccaaaagagtgaacttttaaggagctgccatgccaaagttcaaacttcatacagccaaatgtagtttaggatcccagagttaaccaaataaagtaatttaatttgggtctatacagaaaagactttatatgatctgttccttcaaataatcactcaagctttatttccctgaccttatcaaattttctatttacaacatctaaacttatgtattatatttaaagtaggaatttgtaaagacaaggtaaagacacttctagaacaagcagaagagacatctataggcaggcaggcaaagcacagggctgtactgcaaattccagtgggagtcaaaggtctagactctattctcctttctggctcagcctcttcctatctaaaatgaaatggccccattaattgatctgcaacagttttttccacttaaagacaacttggctctttctgctttgcaggttagcaaacttcacctggcaacagatcaaaatatatatgtattgatggaataaactccaactggcctcctctttcagcagaatttagccaaagaaaccttccacatacctcaataaacacagagactgtgttactccagaagtgacatctcctcactattattctaggagtgtgttctaggctccaatttttttttaaatctgtcattctgaataggtagacaaaagtcaaggactcctctcatgaaatgctttaatcacttctgactgtccaacttctttctctatgaagggacttcttacagaacaacttcattttatccaaataacagaagaccaagggcagctgtttgagatctgttataatgaaaacctgactggcaggaggaaacattggtcaaaactaaaaagcattgtaagcaagttgaaaagactctgaggccaagcagatcttggcacactagggattaaacttttacttggcagtttaatagctgtaaatgttttgtctaataattatttccttgtccaagtatgttaaaaattcaagtaaggaacatgcttggagcctgtcctctgtgcatccatgtcctgtatgacaaagtttgctatgaaagtgcatctgtagcaatgttagagcattgaaaacaccaggagtctgttactctgtagaacttccatgggaaaggctgatgcccagtgagcattgaaggtcaccactctggatgactgttctgctgactctgctggacagactgtatactgactggacttgcattagctctagtatagtaagagattgagaaaaacacacagagtggtagttgagagtgagttctggagtctgggctctattccattggttgctagctcatcagttataaccatgtgtactttgttctacagtcctttatccctttaacataaaaaatgggaagctaccaatggtaacttttagttaatgggtatataggattatcgctgaattagacacctggcatctggttagtaaatactagattttcctctacatgaaaaccaatctgattttaagttttcttgattaactctctcatctgtctatgtatctatcatggatctatgtatgtatgcatctatctatctatctatcacctcccagtgtatgtgtgtatgcatgtgtgtgtgtgtgtgtgtgtgtgtgtgagagagagagagagagagagagagagagagagagagagagagagagagaagagagagagatgaacattgggtatattctagtgattagccatctctgtagtccctcaggtataacttttaatcttttaaataagaatatattgctactaaactgcagcaaatatagctccatatagtgattttatcaaacacttttatgttatgagtaacataaagtatgtttgtattctaagttgttcacaactgtcctttggaaaacttgctataagtattcttcaggacttttaagagagttgtagacttatttttaatatgaagcagaagatgtttatcctctcaaaaactttcaaattcgagaagaagaatgttcagtatcattgtgtttgttaagcagtttagaaaagaaaagcttgagaactcaatgtaagaatgggcatacttatgaggataacttgaaaatgcctttggccttcagcctggtcatagcagcttccgtgggagttgggtctaggaatatcaaaacccagtattattaccacaaaacacatgtattcaaatgcttcactctgccttcgcctgaaagcatgaataagtgagaccttacctgtttgtaattacccacatggacacaccctgactttttaaaagttctacatttatttcacaaacattggtaggagatgaataacagtacattatcaaccaaaagcataacacctacacaatgctgagggaacattttggtttgctgagctaacaaatgttacagttctgaaggcaaggaatatttttactaaataaataccaaagtctcacaacttacaaagaatgagaagcaaattaccacaaatatgtctatacttctgtctaaacacctccaaaagaatgatttttattttgaaaaattctaaaggctatagcttctcaattggaaaggatgatcacatctaacacttttaatcctgtagccacctaaatatacacttagcattattttccttactcttatctctttcacaagggtggagagagagtaaatgaaggacactggataatctgattaactgtaaagacaacatcaactatatcctcaatcctgagtaaagccattctgactttgtattctaaataaatgtgtagacactgagaatcctgcttaaagttcaataattcagcaactactagccacaagtgctttggtaactgaatgctgcttttgcatatttcaaggtaataaagattacagttttgatgataatctgagtgtaaacaatgttaaatgacaacaataacaaaaaaacacctctgagtagaagagatgctatttttatttattctttggtaggtgtagggacccaagtaacttaggaagagaagactcaagctgaagagcacacagacagattgttgaaactgaaataattaaattatgcaaaagctaagaggacagattgtcaaaaatgtctgtatttgacactacagaacacttgcctgggtgaaatgaggttagtacaacttaccacgagaaacgggtaatgtgcatttcttattgaaaaacctaattataacatcaaacagtaagatattctgtgtaatcttaaagtcatgacatatctttggctattaattcaagatatagaaatgttcattaaatgtataaatattcagctgacaaaagctgaaatcctgtgcaatcaaaaatacatccttatttaattttccctgcaatgcagatacaacaatcctcattttatatatcaggactaaaggcttcaaactaaaataatttcaccaaagttatgtcatttgtaaggagcaagggtagcatataaatccaggacttttatttccacaccacttaaattagtctaggatgtcctatctagcaaagtcaagcacctagttttcatcaacctgctaaccatctgttccttctactggagtctagttatatactttcaaagtatggagaaaagttgaagacaattcaatcaagttaaaaatcacacagctgttgttatagttaacattgaataggagcatagcttgaacatgattatttaatctccactggcttgagaggcttttctacaaaatgaatagaactcccttttacacagcctatgaaggcaaaatgtcatggatcatcttgttaacagtagctcctgcaaatgttgaaaataattggtgagcgtggctgttaagatgcttgtagcatctgatttgggagacttattgatgtggatgatcctctttgatgtgggcaagcatcactcagatcatctaggggatgaacagagaaaaacagagaggaagagggacttcatgtgctgcctacctgcatgaactaagtaagataactgctttggaagccgggcattggtggcacacgcctttaatcccagtactcgagaagcagaggcaggcagatctctgtgagttcaaggccagcctggtctacagagcaagttccaaggcaacctcgaaagcaatacagagagaccctgactcaaaattttttttttaaaaaaagatactgctttggtcatgaccaaagcacttgtcattaccaccctaagcagtagactgtaatttacactatatgtctccagatctctgacttgatgcgagtagacctcttagcctctacatctgtgagtcaatgctttgtatgtattcatgtatatgcagatatacttaaatgtgagtgtgtgtgtgtgtgtgtgtgtgagagagagagagagagagagagagagagagagagagagagagagagagagagagagagagtatagtgaatacagaatgggctatagaagctactaatataccctgaatacacaaatatatgtttctattgatacaattacacatttgtgttttatatgtaaagcttataaacatattcctttatctatctaccagaaaagtcactctatatatgccttccttcccattaacaaatttctttgaatacttttggggtaaaaaattttttcagtgaggaacaactcacacctgctttgtctaatgcaacatgggtatgattcaacagggaacatttaacaacttgaaagattgcttccttactttctgaagcttattaaagtcatctctattccagagatttatgaggctgaataaaattttgaaatattataaagaccatctgctggcatccatgtagatggatcacctcatccctggcagggtaagctgcacaaaagactgactgcacatttcctatgtgacagcaaaggcatggagctagtgaaagtttggaggtatccacagaggaagcaagaaagtccatgaaattttgttatactcctcatttccatttccaggtctgccacgtgcctcttcctccttgtattttctactgctctcccacagacttgatcagtttggctaatgtgtttgccattcctgaatacagcaaacattactttggctttgtaactcattttctggagcactcttcctcaagatatctgaatagcttttgccctcatcagctcaagtttctgctcaaacatcacttttccaatgaatgatgtttggtccacttgcatacattccacagggaactcataatttttcttaccggcttttttgattaaatattttgtcatattccaaaatcatttgtaatttttctattatggtactatatatcatttgtctctttttccttgcacatatgaagctctgagtacctgctgagtgttgaattcagaataagctatgccatataaaactttttgtttgcccagaatcagatgtttgtctcaaaccaagaacattatttatctttgatgattttttactacttttataataatattattttcagtgatgagagtcaaacctgagaactcacatatttgacaaatgctatactacaggattatactcacaatccaatctgtgtctttttttttttttatccaatgcatagtatctaaaatggtgtctaaattaattgtgctggctaattttgtcaacaagagtcaccatttgacacaaactagagtcactagagaggagggagcgtcataagattgggctgtaggagagcctatagggtattttcttaattcgtgattgttatgaaggaaccagaccattgtggttggtgccacctctggactgctggtcccgggtcctttaagaaagcaggctgagcaaatcatggcaagtaagctgttaagtagcactccttcatggcctctgcatcagttcctgcctttagcttcctatcctgcaagtttctttcctgacttcctttgatggtgaacagtgatgtgaaagagtaagacaagtaaaaacactttcctccccaagttgctttggtcatgttgtttcatcacagcaatattaaccctaacttagacacctgcttccacttgtttaaatccagcctgtcttcaaagcctgctcaaatttgccttcatttcaggccttctctgaagtcactatcaatcctttttcttctcttccatctcaattggacttcagtagtatccagaataaatgtgtctttctcaagctatctataaatctataacatgtaaaccatctttattttctttttagagtccagcataatacccaacaactttcagacctcctaatctaacctacaagatttattttttattttttattttttattttattcttttattagttcaaattaggaacaagcttgcttcacatgtcaatctcttctccctctctctcccctccccccaaacatcccacctgcccctagccatcccccaccattcccctgaagggtaaggccctcaaaaggggctccctaaagtctccacatcatcctgggccaggtctaggcccttccccatgtgtccaggccaagagagcatcccttcacatgggatgggctctcaaaatcccttcttttttttaagaccttacatatttaatacagtgttttacccctgtacaaatggaaaaaaattaagttcaacatttctagaccaatatggctgttaatttttgtacaatgccaactcaacatggtaaactgggatacttgtttccaaagttgacagcacagctaaagtttccaaaaattcaaatatatataccaataatggaagtatgttatgcatcaatagcagcaacagcttttccaggttctgcagtcatttgaataaaattgtagagacatccagcacactccatttaaaaaaaaagtaaaaaacaacacagttctgttactcttgtggtacctggcaccattttttttttaaattagcttctcaatcatcatctggaaggaaaccattctgagcaacatcattaaaaatagctctgataaagcacggtcactactatgtatcataaagcaggtccacatatgagtgagtacatatcatgtttgtctttttgtgattgggttgccttgctcagaatggtttcttcgagttccatccattttcctgcaaatttcaagattccattgttttttttcctgctgagtagtactccattgtgcaaatgtaccacattttctgtatccattcttcagttgaggggcatctaggctgcttccagtttctggctattacaaataatgctgatatgaacatggttgaacagatgtccttgttatatgagtgtgcttcttttgggtatatgcctaggagtggaattgctggatcttgtggtagactcattcccattttcttgaggagtctccatactgatttccaaagtggctgtacaagttggcactcccaccagtagtggaggagtgttcctctttctccacatcctctccagcataaactgtcattggtattttttattttaaaatagacaggtagaccaatggaatagagttgaaaaccctgatgttaacccacacacctacgaacacctgatttttgacaaacaatccaaatatatacactggaacaaagagaacatcttcaacaaatggtgctggcataactggatgcaaacatgtagaagactacagatagacccaagcctttcgccctgcacaaaacttaagtcaaaatggatcaaagaccttaacctacaagatttagctagttcttttaaaaaaaactaatttggacataatcaaaccttaaaaggtatacagaaggtatttctctcctcaacagtcaatgtaaataaacttagcctgagcaaaaatggtttcaaatgacatgccactgatctctgaatctgactctgaatctgccactgatctctgaatctctgaagtgactctgaatctcaataatctcttttgagtatttgcaaaactaatcatgcttctccatcaaacgaatgacacaaattaattttacacactccatcattctaccattagttttcatagatcatgtttcttgagaagaaatcttggtagttttcatctctcacttgcttttggtttgctctcaatgctccaacacagcatccttcaccaggtgacattcaaacccaactcaagtgtctaagctccatggttctaagggccagggaaatgtattttatggacctatgaccacactaaacttttaatcagcattggcatgtatatgtgtgcattttgttaagagggaaacttgatctgactcaagggtccaaaaatcccaaagagattaagaagcaccaacttgaccttctgctctggttcctgaagatgccctcagcttagcactgatgggttgaaacccctctaaatgtggagtggtgtaaaaaagaacagcttcaatacagactcaagacatggaacatgctgagcgtctggcaccatgtggagaaggaagggaatagaggaacctattgtaatgctaactttagacacaggttacttcaggaaaaggcttagatgtaagaaagatgctaaagacagattattccaagagaagattctcattcatttaaaaccttgtgtaagtgtcaggcaaacttaagtttactctattctcattattgaaattctgcagataacagaggaccttttaaagtgatttaattaaaaagaaagtcactgaatggaagattagaaaaaagattagttctaataaaatatcatactcatgatttcatgtcccatgtctaccatacgatagtaattgacattcacaaaaaccaccgggacatggcattaaaccactgtgaggaaaccatagctgcacagagcggtttctgttctctgtgctgtattgttttctgatctagcagtgggtatgcaccattcacatagtattagctgagatatataattagcaaaattttaaatggaaatgaaagattatttcaagaagttacttgaatttttaactgagaaaaactttctagaaccctaattttcagcacatatttcatttgttcaattacatactattattctccaatcatccactgataagctatgatgtgttatgataaatctttctgccaaaagccaccggagcaccaccgccacgtgtgcactttacgccagccgccaacccgagttagggcccaaataaatacacagaaagacttgtattaggttcaaagctgcttggccaatgactaggattctcatctgctagctcagtcttaattatcataaatctatatattttatgacttatcttatcggacgcctaattggcgtccctccttgccggtggctcacatcccgccattgtaggaggaaggggaaaagacacacttcctctttttccttgcctaaacatgagtctcattgctatgtcacttcctgcctggatcaccacttctctactacatttcccagaattctctttgactcctagtcccgtctaacttgctgtctcattggtcaaacacatattttattcaataatcaataacacgaacatacacagtacattccccatcaatgatgcattggggattggttctcaggagatagtgaatagggtttagacttgaatgttagcactgaaaaagaaacaggttattctaggggtgtattttaggcactaagatacagatatgagtgttcaagatgctacaggagtaataaaaggaaataataggatgggctagggttcaaaggaggtatgggggggaggggatgcttcacttctacctcacagagcaggcactgaggcttaaaggcattcttctgaacagtttgtatgcaaaatgtgactgacagagtaattgatacaggtcagaaagtgaaagaggcaaaagcaggggcatattgcaagtatcctacaattatgctaaagagagaacaaagcatcaaatttagcccccaaaggtgacattgtaatcatgcattagatgctcagtgaggaccacagttcatgggagggtctgacggggagttaacatcaggaagaaaggaacgctcaagagcagttacaagcctttatatgataagctgcagggctgtgaggacacagaagaagatagaggaaaaataaagaggaagaaggaagagaagggagaggttgcactgagaaccatttacaattttaaggatacaggttgcaaggcagctcttgacagagcagacctgaacaactgaggaggcatttaaatggtttaaggtttttcttggcagtgagacacaactgctcctggcacaccaattatgtcagaaaggaggatgggcatcgaagaaactcgttatggagtttgctttcaacatggcaagattagccatttgtgcaagaaactgctcttgcctggactgtttgttgctaaataaactggacatacaggacccacaagaaagtgactactgaacttacaaaacaagacagtactgaagggttcctgttaaaatggagaagtgttctagatacactgtggcctataggctgaagatggatgcccaacgttaaagaggaactttgggtgactgtccaggtagcgagaagtctctgtcaattctagagtttatatattatcctcctgtggtctttgatggagttgaagacagatagttatggttatagttttcttcagttattataaaagataagttatcctttttatttagacagaaaagagaagatgatggggaatgtactgtgtatgtttatcttattgattgttaaataaaatactgtttggccaatgagacagcaagtagacaggactaggagtcaaagaggattctgggaaatgtagtagagaagtgctgatccaggcaggaagtgacatacaaggagactcatatttaagcgaaggagaaacaggaagggccctcttttcccttctgttcctgctccagcagcacaatgtgattcaccgacaaggagggatgccaataaggcatctgataagataagtcttataaaatatataggtttatgatagttaagactgagctaacagatgagaatcctagtcattgacaaagcagcattgaacctaatacaagtttctgtgtattcatttgggcctaactcgggaggcggctggcataaagctcacatgtggcggtggggctcaggcaacttttggcagaaagatttatcgcaacacaggccagatggttttagtgcagaattctaccagactttcaaagaaatattaatgctaaaactccttaaattgttccacaaaatagaaatgaagaatgttgcccaattcattttatgaggccacagttacgctgataccaaaatcatgtaacatgtctcaacaaagaaaaacaattacagaacaattttctttatgaagatagaaataagaatactttaaaaataaataaaatacttgcaaacaaaattcaagaatacaacaaaaagatcatccaccatggtcaagtaggcttgatcctaagacagaagaatggtttaacatctgaaaatattagtaaatgtaattccttatataaactaagtaaaggaaagaaaaaacacatgatcatatcattagataaaagtctttgacaaaatccaacagtccttcatgataaaagtcatggcgagattagggatataagagtcataccaaaatttaataaaggccgtttacagcaggcctacagccaacatcaaattaaatggagagaaatccaaagcaattccactaaaatcgggaacaagacaggaatgtccactctccatatatattcaatatagtactttaagttctaactaaagggttaagacaactgaaataaataaagggggtacaaattgaaaggaagaagtcaaagtatggttatttccatatgacatgatagtaaatttaagttaccataaaaatttcaccagggaacacttacagcagataaatacttttagggaagtggttggatacaagattaagtcaaaaaattcagtagccttcctagatacaaatgacaaacagactgagaaagaaatcagacaaacaacagtttcacaatagcctcagatgatctaaaatattgtggggtaactttacccaagtaagtgaaagactttcatgataaaaactacacatccttgaagaaaaaatgttaagaatatattggaaaacgaaaatatctcccatgcttatggattagtaggactaatagtaaaaatagccttcctaccaaaaacaatctatagattcagtaaaattcccataaaaattccaacataattcttcataaaccttgaaaggacaattctcaatgtgatagggaaaaaaaatacaggatagctaaatcaattctgaaccatgaaagaactgctggaggtatcagcatccttgatttcaagttctactacagagttatagtaataaaaatcacatgggattaatatttaaaaagtcacaatgatcaatagaataaaactgaagacccagaaatacacacacacacacacacacacacacacacacacacacacacacgtgtggacatgtgatttgtttataaagaagccagaaacacacaatggaaaaaaacattaacaaatagttctagctaaactggatgtcttcatattgaagaatgaaaatagatccatatttatcaccctgcacaaaattcaagcccaagtagatcaaagacatcaacataaaaccagatatactgaagctgatagaagagaaaatgaggaatagccttgaaggtattggcacaggagaagactttctgaatagaatactgacagtgcagacactaagatcaacaatttataaatgggacctcatgaaactgaaaaacttatataaggtaaaggacactgtcaataggacaaaatggccttacagaatgggaaaagatttttgccaagtcctcatacaatagaggactaatatctaaaacatataaagaactcaagaaactgaataccaaaacaccaaataatccaatttaaaaatgggtaaaagggggtgtggtggtgcatgcctttaattccagtactctggaggcagaggcacttgaacctttgtgatttcaagttctaggacatcaaaggctgttaaacagaaaaaacccacattaaaagaatcgctaaaaatggggtacagatctgaacagaattctcaacagaggactctcaaataactgagaaacacttaaatgtcagcattcttagacaaaatctactcatcaaatcaaaactactttgagtttccatcttacacctttcagaatagccaaggtcaaaactccctcttcattgccagtggggatgcaaacctgtacagtgactatggaaatcaatatggcagttcctagctatactaccccttggccatataccaaaaggacactccattttaccacaggacatttgttcaactgtgtttgtggctgctttattcataatacccagaaactgaaagcaacctagatgtccctcagcagaagaatgttataggaatgaattctactttgtaagattgctgttccttgaattgtagttccagtactggtcttgcatttggaaatagatagctcagtaggggtttattcatggagatgtctgtgttccttctgaggagtctcctagaggccatgaaaaagaacagatctctatgtgccagcaaaacagcactggaggtgagcatataggactattaaactttgtgtgtgtgtgtgtggggggtacattcatctaaggtgaggtgatgttgaaatggccacaggattgctttagtaaactcttaatttgttttgagatttattccccaggaaaaccaatttatttcctgaattaacttcttccttgtgagcttttacttatagaaggacaaagaattttgattagcaaataattgacatgggccagacattgctttgccttataaattgctaaaaataaattattctacattaacaacactcagagataaaccaaatcacaaagatagtcatctgcagtacaaagaattttccaagaagaaaaataacctgaaatcttaactgattgctgccactgcactggattatataaatgtcaagccaaaaggctttgtctataccagcacttttattttcctcccccaaattaaaataaatctgtgtaaaataaatacacacagggaaggtacgtcagagggaaatctttggaggagacataagttattacattgtagacaaacaaaaatgcaagaaattataggaaaattaagttaaaatgtccagtaagcttctgaaaatggagctataattttgaagtgagatttgtgggaagatttgtttgggggaatcatgaaaatacacttaatgggtgagcttgaagaatgctatgagaagaaacaatagtgaaaaatcaacaggacaagctcaagacacattcagaatttaagggtaacagacaggcagggtgtaaggggaagaaaaccagaaaagaagtgcagattcaaatgccttggagccagaatctcagaacttaacgggggggggggtgctgatgtgaagacgtagccatcagttggaatccacaaatgcctgtggtgcagaagtgacaaggctgttcataaagagagggagaaagagagagagagagagagagagagagagagagagagagagagagagagagagagagagagacagagagacagagagacagagaggagagagagacagagacagagagagagagaacatgattgattgctctgttgtcaaagcagagctaatcctgtttggtgacctaaaaggaagtgataggtctactgaaaaagactgagaaactaatagttttcacacaagaataaggaaagggtagtagatagaattccctggaggaaggaggcatagggaggggattgggagaaaagaaatgataaacagagctgcataaccaaagatagagaacacttcccttctaatgcagccatcttgcaatacctatgggagtgagggaagacaggagagtgagagaatgacctctgcagaagtgggcttaaagttgcacaaggggaacctagatgatgcttcttcagtggccagatgaaatgtgtgtggctctgtgatagcattgtttaattcaatatcgagttgagcagctgaagaaccaaagaggaaagcacctgagtcaatggagtcccaagaggttcagttcatggaagagactccaaggctggtcagcagacagagaatgaactcgtaagactgaaaatgaagaagcacgaatagcagagacagtaggcaaaagcagggctgcttgtgacgggcccgggtgaaagctggagtgatggcaatggaagtacagcaggcagcaaagccctaaggggagatctccaaaggaaagtaatgactgttggcagggtcttgggtgtccattgctggtgaagagctatgccttcagcaaaggcagaagaagccagcgatgaaaagggtggattggttttcaacatggatcgtgagatcaccccgtggtataagatatcgatgtggcattgaaaaacacaagcaccagagcagaaacacaggaaatctctcaaggcaattgattattttatgccatgacatggaaaatagttcttgaatgaaatgagtacccaagctttcccacaacaggattttaaatcattcaggcattgggttaacccattttgttctatatttttaatactcaagaagatataactaatattctacatcccaaccaggtccaaaattttccttgtcttctgctgttggtgtttatattgttacctcctgttttcttagctttagaaccaaagtactcagacaagaccatagttccctgacaatgccacacagagttatcttgcacagacttctatatctgatttttgtttctgtttatcttgcctcctttaggctacaaggagacaaattttgaatcacgatatgaaatattcttatggcacaaagagaaagaatcaaaggaaggggctgagaaagggaagaaaggggtataaaggaatagaggaaaggaagaaagaaaaaaacaaaaggtaacttgccatgaaccatcccttgctgagagaagatacttcatatgttaagcttagacataatcctcaatctggaataagtatttttcagctggttagggcttgggatctagcttcttctaggtgaattttgtgtcatacagttttctcacagaaagactaataaacctacaacccttcgccatggcaagcacagcaatagccaagtttaatttacagcatatgcttgtgtttatattgatagaatacactgtaaggagatattcataggcaaatctgtgcttcacaagttaaatttaatagcacacaggtacataaattcactgtatatttgtagtatgtagtgtccagaaagtataagtgaagtaaatatatctcatagtagcttagtacaaaatcttacaaatagagtagattatctactgaagaatgttcaagtcaaacatggaataaaaacaaaatttaattactgtcttcctgtgagaaatgaaactatttaattttcatgttcaaattcatcatgtattattacccagtgaaactcccatctaaacaaaatttaaagttgtccatgtcaaagacttttaagggtcgatagacctatgatgggaatgtgtcatttacaaagcattactgtgaagatgcggacgtccactgtgaagccttgtaggggtgtatattctttagtgcataatccttatggccctagcaatcagacagttctaattgcaaatgtgactactgaggctgattcctatcaggatgcaaataatcacttgaagagaaaaatagcaattgtctaatattcatttcatttgtaaaggtatttaccaagtatataaaaggtgcagacactccacagtgacatccatgtcacagccatgatctccttgtcataccaatctgctgctgaaagcaactggctcttcaatgactgacaggcacagttgcccatcctacagcagaggagttcattctttgaaagaaaggtaattaacctgttttactcctctgtgactctccgctgacaaagaaccgagagtctccaaatttaccctaacaaaaaggttatttattttttcatgtgtttggtgttttgcctgcatatatgtctgtgtactacttgcattgggaccagataccctttgagacagaatagggcatctgttcccctgggactggaattacagatgtttgtgagccactatgtgggtgccagcaattaaatcctgcatcctctggaagagcagccatcttaactgctgatccatttctccagcccccccccaagtaacttttatttaaattaaaaaaaagtattttagaggataggtttaatttttcttaattaaaatttcaggcactagagtaaacttaatataaaaaaattcagaagacactgaaccctgatattctttgtctttattttccagacctttctggtactttgaggaactgaaatgacaactcattcgggaagaaagggggatggcaaagtcacagtactggaccaggtgagcatgcatgcaatggggtcggcatggaaaagacacagctgaaggtcagccttcatctgatagaactggaattctcaggctgctaaaggaaccaggggaagccagaagcctcatcatccacagaaagagcccagcagcccccttgctgcactgataccaaagatgttgtccttacctcccctgagagagagagccaccaccccacccaggcttctgctcttccctgtgctttgctttagtggatgccaaatgcaatagtgtgttgtgcacaaatggaagattgaatatttgttattgaactgagatagcttacatgattctgaacaaaccaactgctgaaaattaaaacctacagagcagaatgaaactccaaaaccgaatggccactagagaggcaaggcacccaggaactcagtctgcatagtttttgtttttgtttttgtttttgtttttgtgtttgtttgttttctgaaaaggcaggatgctgactttgccaggggcttcgagattctcaggagcctacacagaatttagagaaagtataccagagttccttttggggaaaatttccatttgaggaataatttttctataaatagtccatgaaacaaaattttaaaatcataatgagacttatctaatcaaatctgcctcctaaattcagaaataactttggtggctctcttgacaacagcagcacaatctgccacatggccttatgtgcctgggactcagctcatcattaggaaatggtttagctgaactgccattttggaaatggtccccctcccagcagaatagaatagattttatattacacaatgaaagatgagaattcatctacctgtcttagagatatgctccccaaatgtattccaaattcagttcatctgaaaaggaatttaacctacacataatttcataagacatgggtcatggtctgaccccattttaagaaagatgactatactttgtgaagcaatatatgggtgaaagaaatgctagtgtaatgattttatcctttcttaagaagccattacagggtactccaaagtcaaattaatttctgtaaatgtcttattggatatgaggataagcaggtagagtgggcattcctgctagtgaccttgtaggagattgctctgaggtggtctgagacagcctaggccaactatgcattgccagagaagttctcagtgctcaagaaaaaaaaaaaaaaactacagtaaggtgctccaaccctgtagacactgatatgagatgttctgacattaattgagaaacttcattcagagggttatactttagaaaaggctaatgggttctcaaagcaaggtccagcttttctactttcaacttcacatgttaggtcttacatttgcagaataaagatactatttaaaagttggttcagtgctatgagaactaagttgctggaacaaacagatcatgaaagccctggaatatttattctcttcttgatgattcagccggttttacaggactgcccttacttgggcatccaactacttaagaagaattaattttcaacagttaaggcagtttttaaaatttttttatctttatgcttccactttacaacgtgaggaaaatctgtgttcttcctgagaacaggacttatcctggtcactcactatctagacacaccaggttctcttttaagttgtgtgggaactgccatcctatcatcatagctccaggcaacaagtcctatacagaacagtatttatgtttttagtttcttttatttctgagattataatgtaatgacatcattttccccttcccttttctccctccaaaccttcctccctatatctcaaattcctggtttcctttttttcattaattgttgttatatacatatatgtatgcataaatacatatgcattcctaaagataacctagtctatactgttagatagtcatgttggtgagacttcactgatgtagcttctggcattactagaaaacaaagtctcacagagaactccccgctcctctggctcttatactatttcctcttttactatgttccccgtgacttaggtgaaggaatgtttcctaggtgtaacacttgggactgggttccacaactctgtattttgactggttgggatttttcatttccaaaatatttgtttctataaagagcaatagagtaggaagttgttactttctttgaattaggagagggctgagttctttaggctacaagatgagaaatagggtaatgacccttacttaggtcaactcagtctaccaagataaagaagcaaaaaggaagcttgtggcttaaaacacctgctgatagcagataagtagatgcatatcatctactatgtggctgtttttaacaatttgttttccacttctttttctttatttatcttattactgttattgttttaagatagcaactatggtgtcatggctggcctgaacatactacgtagaccagataggccttgagtttacagagatcaatcctcccttccaagaactgggattaaaggtgtatgcccctatgactggtgtttatatttacttttagttacatgcatgcatgcttgtgtgtagatatgggcaggtgagtgcttgtgctctcagaagccaaacaaggatcccttggcactgaacttataggtggttgtgatccttcaacatggatgctgagaaccagtttggatcctctgcaaaagcaagcagtacatgctcctaactgcagagcaatcacttcaccaccctagttaacaccaagaacatgtgacgcgctttgtagtcactaagttttccctttgaggtacaattatcatacatctatagctggggtttcctgggaacttacagaaatgatcctgatttatcaatgcctttcagcaacacataaaccatctttcacattcctcacagttgctgtctcttatcacttgctcacatggggctgttatgatgaagtgagctgaactagacctgcatttacttgaaaatgtgacccaggaaagtcatgacttcctctcattgttccctgcactaccagcatgaaaccacctgatattttgattaaaataactgttccataaccactccatcaatgagggattggatccacttgaggctctgcatagtaatatgctactaatatacttctaagcacacctgaggatgtaagccaaggtctgtacatgaatcctgtccatcacatagatgtttaacttatttcctattaagaccttatttaatcagacacatgtgcctagtagatagaacattattgaggtggtttctctctctctctctctctctctctctctctctctctctctctctctgtgtgtgtgtgtgtgtgtgtgtgtgtgtctgtgtgtgtttctgtgtgtgtgtctgtgtatctatataacaaatgtttctgaccaaccaatcagcattataggagcacagagaccaacctttgactttccttcctcaaacagtagcctgaggaaaaagtaaggccctctagggtttatacctctgagaacttggtgacttgaaatccttatctatctgactaactgaggttatctcatcctcttccatttaatgtggcaggtaggtctcctgatgcgtttctctgaaaatatctcttcccttcagagagaatgaactttttccagactgtgtagccaagttaaaaataagcctcgagatcctctgagatcatgatgtcttaacctgctatcctgtgcacctttaaccttcttttaaaacagtgcttcccctcaaaacccagcaatactactctggcatatacccaaaggatgctcaataatattaaaaggacatttgctcaactatattcatagcagcattatttgtaatagccagaacctggaaacaacctagataaccctcaaacaaagaatagataaagaaaatgtgatatattacacaatggagtattactaagagggtggggaaggacaatgacatcatgaaatttgcaggcaaatggatgaaactagaaaaaaaatcatcctgagtaaggtaacccagacccagaaagacaaacacagtatgtattcacttataagtggatattagatataaagcaaaggatagctaggctgcatcccacaatcccagaaaagctagggaacaaggaggactctaggaccctaagagggacatgaatgagaacctgagggaactggatacttgagttggaggagggacagaaagggagagcaatgaaagagatattttatttatttatgtatttatttatttacattttaagacagggtttctctgtggctttggaggttgtcctggaactagctgaaagagatattttgttagagggagccattatggggttagtgagcaacctggtgctagggaaacatccaggaatctacaaggatgatcccagctaagactcctaggaatagttgagaaggtgcctggattggtcttctcctctaatcagattggtgactaacataattgtcatcatagaaccttcatccaataagtgatggaagcagatgcagacatccacagctaagcactgggcagagctcctggagtccagttggagagagagagagagagagagagagagagagagagagagagagagagagagagagagagagagagattatataagcaagggatcaagatcatgatagggaaactcacagagacagctgaccccgagctagtggaagctcatggactatggactgacagctagggaacctgcatgagaccaaactaggccctccggatgtgggtacagttgcctggcttggtctgtttgtggggtgtaatggacaattgttacagaaaccacaaaagcccatataaagggaagtcaggtatttactggggaatcacctacaaatgacaatgcaaggtagaaaaccaccggggtcttctgcccttagctgctggatactgccatccgattctgaccgccaaccaagacagctactgcttgctcccagtccacacatagcctctgagaccctggcctgaacgggcctgtatcttaaagactattggctgaaagaattcccccaacagtggagcctctggaagtgggaccaggatttttccctggtgcacaaactgactttttgtagcccattccttatggtaggatttgttgctcagccatgatgcagcaggcagggacttgtgtagggagacactatagcccagtctcttagtagcccatacaggtgtgcctggccacgcccatgagggcgtggtcaggggaggtcaaaatgatgcggtgggaccgtgtattgtctctctctggccatgctagcttgcggcctctgggcacgctctggcttgtttttgggctagtgtttatctgaataaagaaatcttaaccttacggactaccgatcatctcgtaatagctggcacccaatgtggggcagaaacccaggaccgtgagattaagagtctcatgctgtactgattgagctagctgaagtagaaggagggaagcagaaactggttggtatataaaatgaattaaaattttttttaaatttgctaaataaaacagtggttctcaacctgtgagttgcaacccctgggcaaacctctatctcccaaaatatttacattatgaattgtaacaacagcaaaattacagttataaaatatcaataaagtaattttatgattgggggtcatcacaacacaagaaactgtgttaaagcatctcagcattaggatagttgagaacactgcttaaagacaacaatgtagccaatcttactaggccttgggtttgccatgcaaccagcttttacagcttaagataaatgtagagctttaagttaaattgtgtactcttccaggcccctgacctagagtaatatatgtatatgcttgtattctgataatcatttgttgaaagcagccaacagattgaaccttaagcaaaacaagtgctccataattattggaagcaggatatagatatggattgacagtgtcagtttgctgttttgagtgtcactctgggtcagttgaggtcttagtgattttttcccttgcaaaagtttgttaaaacatttctataacacacatactgtgtgtcctctgatgttcaataaataccaaacaaagcccttttgttagagacagacatcacacacacacacacacacacacacacacacacacacaccagccaacagactcaaacatagaaaagacacaggcacaacacacagggaacaggaatagatagatttcacaaactcaacagacaggctagtagccacaaactatagacagatggaagacacaggaaaagaaatggagaattcaaatttaggatcacttttgattaaacaatcccacaggaagtttctgcctccattccttaataccatactgacacattttaatatcccctctgctctaacatagctagacccacagaagaaaatggttttaacttcatgtatgtttacttaagacctatacgggagccattttgacctaaaatactacttaattgacacttcttaattttacttcattaaattcagcataaactataaaatagcataatggcttaatgatgctagtgaaaacatttattgaaaaatttgaaagcacatcagctaatagactcccacatggtataaaaaggtccatcagtaatttggtagtcagacatgtcagataaggcagggcattgtgagggggccgtaacaaacacaaataagtttaattaactttcccagaagccaacacgtaggtaaaacttaaacacctatggtgcaaagccctaacccattgccatggacaataaaatccaaggtcaaggctgcagcatctgcacctcactgcaaccacatacaacgggtgtgaatttttgatgactatgaagccaaaacaaacatgaccaagacatggcagaatggagaaatgtgtaataactgtaacaggcacagagggcatctgagttgtttctcatacaatgccctcaatatgagagcctaaatatatccctatagaaaagtgtcttagaggtaggcatttcctgagcatgctcagtttaatgtcataatctaggagagaaaagttgcagacacactggggacaaggtcagctcaaggtcatggatcttgtgtttgaaaggttaactggtggacaggatgcctctgggcatgctcacccagtgtcataaaatttagctaaaaacaaaggcaagggcattttgaagttgcattaacatagaagtttgccctgtagatacctggctggcttagtaactgacatctctgcccccaccttttcaccccatgctaggttctctaaggatactgaaagttgaaaaacaagaaaatctctcacttagaccagatctttttcttggaagctatcctcagttgagatgccaggagcatatctccctctagccacccagccctttggaaaatcctttttttctcttctgtgctttaatttcctgccttattacaattactggctccttcttctcctggaacccagcatgacaatagtcctaggcaagcacatttgtactgaaagctttgcgataagagttatataccagcctgctcttttccaagctttgtttatgaatttcacccaattctgcagtttgtatcaaagatagtttgatttgaccttcttgaccttcagatgcagagtttggaacctctcactgtaggtagtagcattgaacatgctaacaacatgaatggtaagggtgacatgaatttcttactgttctccatccttgaacatgcatgtctatcccagtttaaactataggtgcagtgcagaaataaaaaaagagcacatttcctttataggaagacagactatagaacagaggagaaaacagttagcacctgtcagcctcactcaaatacttaactcctatatacatgagaacgccatagctattcacctaggatactgccagacatcagcaaccaatagctccatatctttaccacgttatctcttctaccctcagcaggaaacgtccagtcctaccatctgcctggctgcagtacagacaggcaatctgctcttggcataaatttccagacacagctgttgggaatacacatccagatgtcatcagtgtgcaggtagcagagatgccaagaagacctctcacaaggaggtagaaccattatggcatgctggcacatggacatggatcaaaacacaagcagtggtattcatccaggagagaagtggggctcgtgcttagcaaaagcctctggtctagactgctggccaagagagttaactttgtttgtctaaaatatattagtttcactgtgatcactgtttatagacaagctacactatcatggcagtgacctgattttgtcttctcttcgctcacctttccagttatcttcattatcaaagccctgaaaaacagaagcaggttgggttcccccaggatctgttggtccttggttccatgcacaactattttctacaatgacattctctgagcagattccaagtctgcacagagcacatcttgctttgaagtttccactcagaaccagccttgggcagcatcatgtaccaggcaaggttctcaagggcagtgccagctctcccctttctggcctactgtcccattccgtctcctgacatttactccattaaatcctgctctcagggatggccttaaaataactttgcatgctcaactaaaagaatttgcatttaggctcatttgcaattgaggaggaagtgggtttaaatatttaaaagaaaagtaagaaagtttacaaatacacacacacacaccatcagggaaatgggtgacccaagactgatgagtctgaaacacagtgataggtaagtcaactgcatgcttggagaaactttgtacctgctaaagactggactctgaagcgaactggagggaatacttgaggacagtgcagttgtctgggggaagtcagaaactctaatggaaattgtttgcaactgatgcatgaaatgaaagaggagacattaggaaaacgaggtaactcagagcaactctgtgtataaaactacagtatttaaaaccaccatctattcccaccaatgaaaaggataatcagcccttaatctacagtcaatatattaacttgcagaaatctacaaatctctaaatcgtgttcttattcagaggagacaaaaacccaaataaagcaaactagaaatataaatataaggaagctttttttggaagtcggtagactctatcttttcttctactctgtttgttgaggtcaagaataagcatagttctagcacaggttcagcttctcgaactcagagactaatcatgccataccacacaaagcaactcctgtagcatctgctgccctgttgcattcagagaggtgacacaagagacttcatgttattacacatccactaccctgtaccaggctccaggcaaagtgttttatgtgtgacttgttttgtaaacacagctactgaatactggcctacatacttaaaaagtcaagaaatgggctcacaacagcttgctgatgtccccaaatatcaagcaagagcttctggcagagaatggaggatctgcctgtaaaagcaacatactcccatagtcacaaggctagagtcataaggctgttttatgtgaccaggagatggggagtagaaatatttggtcttctagtctggaggataatagttcaaattaaagctgagagcagagccagcctccctgtgggacattcggggacccttcctgtctcctcacagctctggctacttgctgactgtctttgttatttcttgatttgtaactgtgaaactgtcattgatgtctccagcagaacatggcattccagctgtctgtctccatcttcacaaggctgttattgtacatgctatgacactaggagcccattctacaccagtgaaacttcatcctcgctaaacacatttacaatgactattttcaaatagcactctaaggtactagagagttagccttacatatatttcactttggggaggaaaatgtgtttatgacacaccttacatttcacaccgaaacatataggaataccagtttttaaaatgtttaattatttatttaccttttatgtgtgtgtagtctatatatgtgtgcacctgtgtggaagagtgtatataccagttgggaggacagaggggatgtcaagaattctgctctatcattttccatcttattcccctgacacagaatctctcattgaacataaagtcactatttcagataggttggtagaccagtacactcccagaattcatctgtctccatcccaccacacttgggttacaggtgtaagtggccacatccagtttttacatgggtgatagggattcaaacccaggccctcatgattgcaaactgagcactcttaaccacagagtcattaccatagacctgaataaaaccattcttaaatgttttagttcctagtttatttagtataataaaaaaacattttttgaggttcacaaaacctataaactatttgtaaactgtaatataaaagtgaatgaagcatattataaaagccactgaatccttttaatctcatgcccattctgtcttgtaacacatggtttaaatcctatatttatcttagcaaccaaggtatttagcttacgtattagaaggaaacagattaatgtccaaataggagtctcctctgctaagaaaatatgcagaaatgaatcttagaattaggactatgttaagactggggttggagatgaaatgttaggattttccttcattagaaactggaaccagaaggtgttttctcttttccattatataattttgttccttttgtcaaatatcaggtgtccatgggtatgtggatttatgtcttctattcaattctattgatccacctgtctgtttttatgctaataccatacattttttattactatagctctgcagtagattttgagatcagggatggtgatacctctggaagttcctttattgtacagcattgttttagctgtcctgggtttttgtttttctaaatgaagttgagtgttgttttttcagtgtctgtgaagaattgtgttggaatttgaatgaggattgcattgaatctgtagattgcttttggtatgatggccatttttactaccttagtcctaccgatctgtgagccttggagatctttccatcttctgatatcttctttcttcaaagatttgaagttcttgtcatacaggttttccacttgcttggttagacttacaccaagatattttatactgaggctattgtaaagggtgttgtgtaaagatatattatttatgatttgttaaaacttgcctgaggattcagaaagcaaaatcagccacgaaatatagaaaacaggcacacacctttaatcccagcagtcagaagctaagaggtggtagtacacacctttaatcctaggactcgggattaagaaatagatgaatttctgtgataccaaggccacccagatctatacaagagtaaatcattgtaaaagagaatcatagcccatacctttaatccctaaaactagggatttacaagacagaactaaggtctcagaccttgctgaggagactttccagtctgaggcttggtgagagcatgtggagacaggatcagccctttcagtctaaggtagaggtaagaggctagtggacagctgctttgattttctaatattcagcttaaagtttgaacccaaatacagtctctgggtcatttatttttcatgttacagtgctgattctctgatttctttttcatcccatttaccatttgcatataggagggatactgatttctttttagttaatcttgtatccagtcatttgacgacaggtgtttatcagtctggtagacttgttggggtcacttatgtatactatcatataatctgtggataatactttgacttcttcctttccaatttgtgtccctttgatttcctttattgctttattgttctagctaaaacttcaagttctatattgaataggtatggagaagaatggaccatcttgtcgtgttcttgcttttagtggcattcctttgagtttccatttaatttgatgttgacaataggcttctatattgcttttattatgtcaacaaatggtgctgttctaatggactgttggcatgtagaggaatgcaaatagatccatttctatcaccctgcaaaaactcatgtgcaagtggatcaatgacctcaatataaatccaattacactgaatttgatagaagaagtgggaaataatctcagttgcacaggagacaacttccttaacagaacaccaacagcacagacactaagatcgaaaatttataaatgggacctcatgaaactgaaaagtgtctgtaaggcaaaggagactgtcaataggacaaaacagctggatacagaatgggaaaagatcttcatcaaccccacatctgatagaggactgatttctgaaatatataaagcaagaaagctagatatcaacaaatcaaataatccaattaaaaatggggtacatatctaaacagacaattctaaatagaagaatctcaaatgaccaaaaaacacttaaggagatgttcgccattcttagccatcagggaagtgcaaatcaaaacaactctgccagagtggctaagataaaaaaacacaaggtacagctcatgctagagaggatgtggagtaagaagaacactcctccattgctggtggcagtacaaatttgtacaatcactttggaagccagtatgatggtttctcagaaaactggaaatcaatgtaccacaagatccagctataccattcttgggcatatacccaaaggatgctcaatcataccacaaggatagttgctcaactatgttcatagaagctttatttgtaatatccagaacctggaaacaacctagatgtccctcaaggaatggactaaaaaaaataaatgtggcagagtcctgaaaatcctgcataagagaggggaaaagtattataggagccagaggggtcaaagacaccacaaaaatcccacagaatcaactatcctggctcccagaaactgagccaacaatcagggagcctgcatggtactgaccaaagccctctgctttgtaatagttgtgtagcttggtcttcttgtgagactcctaacagtggaacaggggctatctccaactcttttactggcttttgggaccccactcttcatactgggtcaccttgtccagccttaatacatggagaggtgcttagtcttactgcaacttaatatgccatgttttgttgatactcatggtggacccgccctttcctaaaacagaaacagagaagtagattgggaggtaggaacagaagaagagtgggggaaggactgggaggggagagagaggggaaactgtggccaggatgtaaaattaattaattaattaaaaagaaactgtagacattattacaaatatattaggaactattaatgattatattgtaagaaagaataggtgtgaataaatttttcttatattgttgtttgatacgtgaagatgcatataaagatgagctaccaaaggtctctctcatactctgtctattatttgctcatctatgatcaaatctgagaaagccatacagttttaaataggactcacaaccatattttccactatcagttaaaaattcttcttgtggatggtttcatttaaagcataacactctaccccatgagactgtgtaactctaggccaggtctaattaacagagtctactttataattactcacatgcttgaatgccaacaattaggtcactatatctttaataggagctctagattaaacaagcctttgggtatccataacagtgctactgtgcttggctcagctcttttttgtagatcagatgaagttaaattttacttcagcttacatccaattagcctgtcattgcttgacccatattagagaagagatacaccataaaacttcttgcttctatataggttgcatgtatattaaggatttcttagtcatggtaccaacaaaagtaagctcatgtcttatcccatggcattctcctgagtgtccagcatcctaagcaaaagcccacaggctggaagaagatctggtggaaggatgctgtcacagctctttactaatatataaactctatacttttctttttttcatagacaattttttattagttcaaattaggaacaagcttgtttcacatgtcaatcccttctccctctccctcccctcacccccacccctcctaacactgaggaagttttgtagacactgaaatgggatgcctggatgaaacaatctcagaatcaaaggatcatctgaggctaaaactgtaacacaatcaagtgattcatttttaaacccaaagttgatttttatagatagaaatgacagtttccaaaaaattttaaacaatatagaagaatcttagtcaaaatttaaaagccctagttgagtggttgttgtacatacttttaatcccagcatccaggaggcagaggcaggaggatctctgagtgttggaggctagcctggtctacagagtgagttccaggacaggctccaatgctacacagaaaaatcctgtctctaaaaaccaaaaaataaagtaaaataaaagcccttttcctattacccaaagctggcaactcctaacattattccttcagacaatatccaaaaatatataatcatatatagatacacacttttcacaagactcttttagttagggtttctactgctgtagaaaagacaccatgaccatggcaactcttatcaaggaaaacatttaattggggctggcttacagtttcagaggtttagtctattatcctcatggtgggaaatacggtggcatgcaggcagacttggtgctggagaaggagctgagagttctatatcttgatccagagacatcagaaaatgaactggcttgagcttcggatacctccaagtccaccccctagtaacacacctcctagtagtgccatttatcatgggccttagggggccattttctttcaaaccgccataaacacagaaggaaatacatttttcatattcttttaagaagtctttctctttatatccatctattttcacttcaaattagagacatggaaggatggataaacccacagttttaagggagttaattagtatccaactatgtgctagattacagcggatgaagacagtttgctgccatgttttctatgaaacatatgcaatatagtcctttaacttttctgtggacgtagtgcaagactgactaaaagcagatttctagaggaggcagattaaaattgtgtacatcttaaatcttagtgagaaatatcgcaatgctttcctgagaggtggtgcggtagtgtgggtgtacacactctgaacccacttaggaagactaggcatcatcaaacacacaaatctcttcccatttgacctggaaaagtggattttttctgaaactaatatagatgcaatagtagtgtttgctagagttacagtggatggacactatgctttgcatcatataagtaaatattgcaagcaactttctattttttatgttcagttcactgggtgagattttgatattatcataatcttgacaaaaatgtatcatctagtaaactggagagcctgtggatctctaagactatgagaagcctaggaatccaggagagagtttttgggtctcttctgcacctataactgccccatggccgatctcacatcgctgcttcccagaccaagctgcacccactatggtctggagccagcatgcccagattgctcgtcattcaccctatggaagccagctagttattcctcatattgtatctttgacttctttttcttctgcaaaacagagataaatagtacctatttcttacaattgcaaaaaaaaaaaaaggatcaaacaagatggcataatgacatagtaagcaccatttctgacctgcagtaaatgtgttgcattgttttgttttgtttttattactgtgctgtggtcatgcccctgtgaaaaagtacatattttattaattcaagaaggaaagagtgtgtgttcattcccaagccttgaacagacacagtttccaggactgctttgaaatcaatccgtggataaaggtatgtttgaatgtcagtcaatagcactaggctctcttgtccagaaattgaggataaaggtcagccaatcccaaacctctgtgcttctaaaagtccttttaagtctatatacttcagaggtttcagggttctgcccaaatcattcactccctttgtattctgtatgttagaactgcaacttcctttgcttagccagaagcatattcagctgccaatctcaggcacggagtgccaggcttttctgtatgtgctattttgtatagaaataccaagactgaattttactccacttatttgatgcacagtggagcccacttccttccccttcccacctataaaatttcaatcttcagcataagctaggttaatcaaagtaagctgtgcttcaaaatgagaaatagctcattcatttctcaaattttatcacagcaccagaaatataggaaaattctattttacagtgccggttcaaaatagatcaatttatatgaaaaatatgttattgttgccatattaagcaactgtaatgaaagtgtggtttgtctttgatctacctgaatgcatgttgttttaaacaaaattgtctataagttaaaccctcagtgcaaaatgcacatatacacaaatgtatccttaagtgcttgtctgtataaccgagctattgcccatgcaaattccttagatggaaaataagatgattttcattctggaactcttggcttctgtgttttaattgtgtgattcctactgtcatgctacatggcttcctggctgctactcccattctgactctttatttaaccaagttcttccttcttcatctttcctgaccaaagtcttacttctcatccttactacgcactggtggccccttggattctaggtggtaatgctttcacatctcagttcccttgactgtccttcccacttattcatccaaattgttctcaagtgtagtttctttaactgattcaaatcccaaaatctatctcacgtctctttctcctttgcaatagtgcttcctacagttttcattaccttccaagttaagttagagggtcgcaataattctagttactgtcaatgtatagtcaacctctaaagttttattcatctcccaaatagaaattgaaattatcgattaaatcatcccacagagtatctggccatcacatcacggctgagtgtaaactcaagatggaaacaaaatcagccattttggcccttgcacatttttagtttttgttttgtttttcattctcactttctctctgccattgtagccactgcagtcatcacagtaagaagtgttaatgtagaagggacgtgtgggttacggaaaatattctagtaagtggtttagcactgaggagtcacttgctataactcaaactctggtcctgaaggttgtgttccttacacttccagtagtcgctggaatcccagtacacaggtatacttggtgaatgcagaagctatcacatttaggtgaagctaatatgaacaaatatatacacctgcaggtaagctttaaaacaacaataattgtttcacaagtgatactaaaatggttttgtatccgtgacaaggaatgtgtggtctataatttcatttgttaccattgtaacttgcacccgaatttcctttaatacccacctgcttcaaatgagaattaccttatataggaggcaagcaacacatctacagtgatcaacaggggccactctaacagattaagtactcactaaaccctgtttcatttctcttgctacttacttaacctctaagtaaggccccgttgataagcttaatcaacagaatttggcaaaataatatttccacttgatagtccacttgactcacaaaattctccacaggtgatgttgaccaactggagtgactatgaccctggagaatatcatatatttatgatgtagaaaccagatatgcagtgcacaggtcctgaattattaactggagcagagtcatccaaccagttcattattctcactgaactctgaaaccagtgagaaactcactgttgttgaatcactgttgtttgtctgccacagtagcaaaatttaccttaatagatacacgttagaaatgatttttccatatataatccattctactatatgttcaaatgatattctacaattgactatgtaaattttatttggaaaaataaacactttaattttgattagaagtcaaatgccttatgtaaaatgcttggaaccagaaacatttcaaatgttagattttggaatgttttcatatatataataagatattacaagaatgatggccatgctttgttgactcccatgggaggccttaccccttctgaatggaggcggaggaggagtggatggagcagggtgttaaaagaaggtgggggaacaagaggagaggagggaggggaaactatgttggtatataaaataaatgaataaataaatacataaataaataaatactcaattttaaaagagatattgcaagaatgatacccaagacaaaatacaaaatttgcttttcaagtacaattcatgcatgtagcctagtggtaaattaatacagtatcttagttaatgtaaaattttgattgtcacctgtcacacaatgttaaacatggatttatgatatcgtgtaatagtcataatttttgtaatttggaactttttatatttcagatttttacattcaatctgtaactttagtacctcagaaggatttcaaaaggggttcatatgtaaccaaaatgcacacaacagcaataaaatgacaaaaaactgtcttcaagcattttctaagcaagtaactcactaagcattatgaccttcatactgaaggaagaaaccttgacatcgtgtgtatgatttcattttattatgaagaaacaatttagacaggcaacaccatttgaaagaatattatggaagcacacatactacaaactactggtgtgcacgaatttgcttagtttgtgatacttctatgatttcctgactatttggccttctttcctcttctaatactctatttcctatagtcctgaagcaacagaaagcaaatcacaaattcacagtctgactttgtgacagctaattcacttatttacatttgattgtcttaagtcaactaagagaccagcctgtgcatgcctaggagtgattatctagatcgagttaattgcgaatgggaagacctgcactctctgagtggcaccattccatgggatgaatttggactggatacaaaggagaaatacagatgagcataagcattgattgatctctgcttgctgactgcagatatgatgtgaccagtacctctgggagccctaactttcccactgtatacattccactaatgaagtgtgagccaaagtaagcccttccatatgatgcttttgtgtggtgctttgtcataacagtgaggcaagaaaataatataatcttcaaatgagtctttttcttttctttttttttgtttcactctctgttcctcctgtacatgcacagtctatttgtgcttttctgctgtatgacatctgcaggatgctccctatgctgatggcataaaaacagtacccattatcgagagccaggctgcaaatcagtggcctcaatgctggcacccacccagaagcatctggtttggccagcatctgtgagaaactggatctgcctccctgggctcttgctgatgacatacagtctctgagggagatctgtattaaaacacacacacacacacacacacacacacacacacacacacacacacacacacacacacagcaactttggaacaggacaggtcagctgagaaaatgccctttacacacacttacaatgtcacttacattgtcctaacctctcagtgtttctcccttatacacagatcttcaaaacacccccatcacagggcctctctgccttgctcagatcagtacgattgctctctcctaacacatcttagtaagttgtagacaaatacactgtgcatggctataccaaagcccagtagatatgtatcataccccttctttaaacttgttttggttattaagtcatcaatatatattgaagctaagccccaacagaagatataaaactgattaatgatgttttaaaagcagcattatcttatagacagtgttatagactttagtcagtgttgaaagcacagtccagctgttgaatggctctgtaacctttgaagtattacttgatctggttatgccttggtttccttatctgtagaatggagactatagttatgtttacttcctaagctgttatgggaatttgtgacttaacacatggaccatattttagatgatgtcgagcacagcatgagagctttgtaaagtgctggctgtcattactatttgcctccttgcacatcattgtcaattcagtaccacatgtagtactataatagccctagctaacaagtttaagtgtaaaaagagttttaaaggaattgcctctatgaaagccaatacgtttttctactcttactttcaagcttcaaaaatggctctatattcaggtgtgagagtatttaagatgtcctccaatcttgcttgagctttatgagtttacaagtttttaagacattcttttctaatctggcttaggttctatttttacgtgtttttaagtgcccatgccaaggtgtggtttttgcagttttgggggtaggaagtaggtgaggaagaatgtagctttagaagagagtaaaacatacaacagcatctatgccaggcctattgtccaaacactctttagataaaattacattcaatactatgtaaagtaggaacactgggggatttcttcggacatgaatgaaataagtgttaaaactagttatgtacctttctagatgcctgtgctgatacattttgaactacatagtatatagtcagaaagacatcagctcaaaagtaattacgaaccttccctaactcatgtcttgtatagtggaaaaggtgactcattcacacgaattagtaaatgtctctcacctacgattgtcatcagaatgaacaaattgaactgtctacggatagtttccatgagaaatgacataaattactgtgcttgaatgctatggtttcagtacaaattgaagtgtgaacgagtcacctcaggggatgaaaacaaacacttgaagccttggttccctttgcaagaacattcaggaatttggatgcagaatggggtttaaagacaaagggtattaaatagctggggtaaagagataggatacaagtttggaaagtgctttgcagaagaaaaatgatgtctaatgccacaaaaggttattccatgttacttcagggattcggttataaaccagttcaggcagtcttctgaaatgtccacttcaactgcaggtgagttaaacatagaaatgaagcaaggagactggagaggaagctcccattttccaaatatataggtaatgttgtaaacccagaccttcctcagagtgctatctgccagaaaactgtgattatgaaacagaactttgaaactcttaacaaatagtcactgtctacatgaattcctttctatttgctaaatgagtaaacaaaaggaaagcatgcaccatgctattgacaactatagttctgattactgggctaaataacatagcgtgtgtactttacctttattttaaaattttcccttaacatttaaattacagattggattgtatctttaagtctttaaagatttcctcctactgggttgtcttgtctagcgcgatatgagggccattgccttgtcttactgtattttgttttgtccttttagctgtcaactcttggaggcccgctcttttctgaaaaggaaacagagagggagtggatctgggagagaggggaggtgggagacatctgggaggagtggaagtggggaattgtgattgggatgtattgtatgagagaagacttttttcaataaaatatttaaaaaatactttattttgttgagaatttcttacaatgtattttggtcatattcttcttctccaaaatgctcccagatctacgcacccctctacccacccaattgcatgtcctcctctttttaaagccatcaagtccaatttgtgttgctcaaatactcttgggtgtggggcttatcctggggtgttatcaacctacgagagctagagaataacaacattggtaccaggaacggattacttcttttagagttcttgaatagtagggtcccacagactcctaagtattacatgatattggcattgctctttgttacccttcagaacttgatgataagaccatattgctgaatacaccacatacttaagtgataaacatggtcaaaatcaagctggtatcaccgagaagctttaaacctgatggctagcttccataattctgaaaggttctatgtatgctatcagaggagaatagtaatcattaatcatacccagttgtaaaacctgtgagctacaataacaattgtcccaacaagataaccactaatgcaaagtggtacaaatgttatgggaacaaccaaccagttttttcttggatttaaggcctgctctttgagatggaacccatatctggcaccattattggagataaggacctgttgctagatggctcataactagtcaaatcttcttaatattacttagataagtagatacagtattataacaacttttaatgattcattgatatacccatgattagcatatatctcagcctcactggagaagcttccttttgcagtatggagactgacagactcacaattggtcaatctattggtatttgctagactgggttggtaaagagagagggtcagttttcttgaaggtttaaagataattatctatgctctgttagaaaattaaagttctttctccctataatttctgttcatattcaaagttcttattaacttattgagcattacaaagataatgttactaacattttataacaaggtgataaactaagactgcaagccaaaattaaagactatagattctttagtaggagatacccattaagttaaattacccattatcttttagcttttataaagaggtaaagatatataaaagagatgcactaaatatgtctgttgatgcatattgcataccaatgggtaaattcatttccagaagaaaagttgatacttttcaatatagagctagcaattttctagacattaatggatagtgtaatcacagaaattctgtatacctctactattcaaaataaggatggttttacagtatttttaaattttttgtaccatataaaactatttggacattttaatactttcaacagatctccattacgcttgaaaacatcaatataaaaataatgagtggatatattttcatcaattcccaaatacaactaagcttgacttttctttcttctttaagtgctcccaaattatgccatttttgtccatgggacttgtttccaagagcttggtcccaagctaacctctcttaattccacccatggctgatggagaaggtcctctcaccacacagggcattagtgagctgagtcaatagaatccattctatattattctgtctgtatccttggagtggaaagaggaagggatttggaattctaacacaagataggcaggacactgcttgcaattaagccaattatttcaccttccatatctacctaatcaatagctgacatgtgccccagttagaactgaccatgaccacagataatagtgtaaaaggatgctacagagacaggtgatgccacaagaacacaacatgtgagtgtgtacaaattttaatgtaagcaaaacatccacaaaaaaaccagtaacatgtggaaacgtttaaaaaaatggtgttgaattattataccttgatgttaaccctttgtgaaaaattcaggcacaaaaatcataggaggatattttccaatgtgaaaaaatgtgagggaaagcattatgggttaaaaaataggaacaattatatatgattctaatcctagaatttcagaggcagaggcaagataatcaagaattcaaaccagtttgaaatacatagtgatatgcatgagagaaagatgaacagggagagagaagggggaagaagaggaggagagaagaaaggaagataaacgcatgtgataggcctccatatctttagtttctacatgcacacattcaacaaatgttagattaaaaattttgaaaagtcataagagctacaattgtactgtatatgtgcattcttacatatcttactaaaaacatctaagggcgggagctttctcagacagggagaatggcagtatttctttctctcacatgaatatcaaatcaactggcccaaaggttattattgttcttttatagttagcagtagaactttgtctcattctgctctggctgagataacaaaatcccacagattcaatagattaaacaataacaaaaacagtctattgcttactattctggggaatggaaagcccaaggtcaagctgctagtcagtttctggttagggctctgctgccagcttatataggcatctttttgctatgtcctcccatgacaaagagagtctgagattcagcccaagcagacttttgtttctccctatgaccacacttatcctttgccatctcatcagaggccagcacagtgtcactggggattggaatttgaaaatttgcattttaagggggaatgtcaaaccttttagaaagtgttgcctttgttcatgataaaaatccaaaaaggcattataaacacactaatgtaccaaaaaagaacaacaaatttattcttttcccatttaggaggtggaagaagtctaaggtcaagctgactataggacctgtccctcctaggcttttaatagagaagaccccttctatcttctaccacttaactgatattctttggcatcctttggctcataaagcatcacattgatctttgctttgtcacaggttgttctgcctctgtgagtctttgtgtctaagttaactcttattacaaagaggcaagttatcttgggttaagggccaaccctagtccaaatggaatcatttacccaacaatgacatatgtagtgatggtattttcaaaatggaccacatttcaaatgttaggtagcttaacaggtatgagcatgtttgaagaccattgaggaaggatctctccttcataatctctttggataccctatagagtctatttttctggtaacccaagaaaggaaagcatcacaattgcccttccttaagattagaatacacatgaaaattagaattagagggcttttctgaagcccattaaggtaaatctactcctgttcacactaatgatgtctgagttctacctctagccctaggtgagacaaaaattctaaacttcccgaaacaatgtcccttccttccttcaatagttaatccaactggacctgttagctaccaagccagaagaccactgcttgggagaaaatgacacatctgaagatttgctaaggaaatgggagcaataattattccaccaatgtgatagtgtaattagatagtgcagaagcccctccagccatgtaagtgctcacagatcatcgcttcaaatactacctgcttttggaattctaattcaaaagtctaactttgtatcttcagataccagtcaaaatttcagacatacttgcctggactttctaggatttcttactgtttttcccaatcctcttcttagatcccacacaactgcctgcagatctccattgctgagtctgtccaccttcttagaatctaagtcaaggggtgtggctttccctctttctcttgggcacacccctttctccagaagctgagacttacagtttgtttgctctgtgttctcttagacatcaacaaaatggttcttcagcttcccactaagtcagttctaatttagaaccctcaacagggacctatgatttcctgctaacaccttggtactgaggttaggacttcaacctattcatgtcttttagaaaacacaattaaaaccctaacatgtttgtaccaaatatgttgataatgttctgaaaactgtagatcctgaattttggtgggttcctgaagccccagagtttggagttagaggacacagttggaaaaactaaaaaatggaactcaagactcttcccacatgcttcagcttggacagaactggttccatctgtttctgagagtgcaggtttctgcagtgctaagtatctgacttggtttaccagataaataaatgtatctgatcttgagaatcagtgttgggtgagtgcttccttgagcttactatagatgagtgttgtttagggaaaaaaaaaaaagctttcacaggaaactaccgagtcaagtaaaaataggcaatgtctttgcaacagggaccctcagagcatattatgcataaatgtctgttttgagtagaagagcaaggctcccacagaagcctgaacccatttaaaggtaccgacctctgaggccagcatgagagaaaagtaccttctagaagaagtacattttcaaaaataagacttgataattctctatggtacttgttcctaacccatgagccgaaactcctttggggtcacgtgtcatatgattcataacattagtaaaattatagttatgaatagtaacaaaataattttatagttgggggtcaccacaacatgaggactgtgttaaagggtcacagcattaggaaggttgagaaccactgcttaaggggaacatgaaaatgcatgaggatggtggtgatacccagcagaggcatctactgacaggaacatggctaggcagactatttctgtattaacatataactttcccttatgtcagagatgttatactgtgttagccatagcaacagttagttttaacatgatgcatgtgtgtatactaacagtttacttttagtttttcatgcatgtattctggaatgtggagaacatggacaaaaggtaaaggtgaaaataaaccaagatacccaattctcaaacaaacaatatacttatttctaattaaatatgtaaaaccagtgtgagtgagtatcatagcttcaactatgtcgtactgagtgccataccaagattcaactgtgactgccacacattttctgtcagtcagccaaggaaatgctctaagccctgcaggctgggccattctctgtcactgtttcctgaggcactgagcaggaccagatcaagggccagggtgttcaattttaagtggccatgttccaataataagttttccaagaaatattgactttggaagtcaatcatttcacatgtcacaaattatttgacttttgagttatttcactccttagaaagggtaatatgccactgactgacaatgagctacatgaaaactatccagactggagtttactccaagccttagtttatccattttaattatgtttgtcatttattacatttagacccatgacatataactctaaaacatatatagccttgggatgatgtcatcaatttatttattttttcttcattccaatgagagaaatggcagagatggaaagcatgagttattcagggcactatgaggtcctggggtccctatgacagacttaaaagtaaaaattttttaaagtaaatttaaaatcttgaccaaaaagattacaacatggcacaaatatctcatgttgcctacaaatacttttaatattaaattttctcatccactcattttgaattctaaaacagtccatctattagtttttcctagtacacagagtaaaacaacagagcctggtgcagacatctttattttgaaagccaaggcccaaagcttcttgagttgcaatctattttatcttttcttaaaatgcttccctttctgcctctacatttcaaagcaaaatcattttacttgagaaacgagatgctttttaaaaaccattcaaaatgtctaagtttaaggctgtggaaatgaataattatgttatagtctttgtcagagagaaatatctccctctgatttgactttcataaacaaggtctacagctggctgccaacattggcagaatgaagagacctaggagagaaaagggggttgtttaaaaagagcaccagctggagggatggactcaaaccacggcttcatgtttcaaaggtgacacaatgttcaggtatcccaaatacattagtaggaaaataggcagacattcctttaaaagtgtaaagcatatagtctagcatttcaaatcctgggtaactacaccctggaataatggaaatgtaggcccatccaaaaatatgcataccagagttgttggccacataattctaagagttacaaagaagcaaccctatgccctcaactgctctagagaccgaacacaacaagctgtccaggcttttatcatggtggctcctttcactgtatctcagttttatcataggtcacttccctttgaaatatttgctggcttcctcttattgccaggatacagccccaactgtaaaacacaacacagtacagagtctgccttacagatactatcttgatgtgacctgcacctaggctttcagccacaggggacccacaagcccttttattctgcatgccttcagattccttacctcctgtctgttgagtcccatgttttaaatttccatgactctatcatgtctagctggaaactcaacgtcttcaagatcaaatgaaattgcccttcctccttgataccatcccagtggattcccctatcactttgcactcagagacctctttattaccactgtgattctctcttcttccttttctcccttaaactttgcagcttctagcagtctgccctctaccaacaaaaagcagttcaaaagtatagagtctatgagaatggggaaaatgacctacagatatttaacacaaatcctcaaccaaaaataatgcttcacaaatgtgagaaacaattagtatccttgaacaatacaccattcatcctagaaacagctcatatttctagtttacttgtaacatatctcaatacagcagtgcctttgccttgcatgtggaccaggtgtgaaagagcacgcatgtaaacatgcaggtaagtcaatggtaaaaacaaaggcatgtgtgaaagttgtgtgtcagtgtgcaacaggtatcaccccgtatggcccccactccagaaaatactacaagatcagttagacttgagtgctgtgctttacagttttactcttattcaaaaactgaaagtttaagttcagtcttcatgggattatagaccctcctaagccccactttccttgaagcttaaaagatttacctggagtggatagaactcaattggttttgagtttcttaactaaatgaatgtttagatcactaccaataaactcaaaactctttgtaacatctttgacactaataaataaaatgggagatttcacacttatgtgtgaaataaagtagagtaaaaaccccaagagaactcagtcccactttggggaagaactgaaagttttctttccttggagtcttaattgtctaagtccctcactcacactgttttaaagactgttctatagccttcctttgatttataatgccagaatgaacaggaactttagcatagaccagaagataggaggggaaatcgctggctcctagggacactttcttgggaagcatggggatgtcttcctggtaggctcaccgtgggagacagagaaacatgccacagccaaggatggagcatttgtttataacctgaaacgacagttttatgaaaaatggtcctgctgtgaaagttaagtgcttgatgttacactttcactgtaaccgtgctcttgatgttacaccttcactgtaaccgctcttgaaattgctgacagaattttcctctcaacaaaggagagctataaaattctttgttgttgatgaacagatgtgagattattaaaagcaagagaatttagttcaaacaattacattgtaaataggtttctaactaataggaatactaattattcttccctaatttgtgcatatattagaatggattaatctcatagataactgccaaccagataaaatgcatttgacaatcgttatgcttatttttcactcatatttgcctacttgtttgggagggaaaaagaatccaaaatcgtaaatcacattcacattgcacttgcctgaaggaccagtataatgattgaactggaatttgcataagacaataaaatatgactatttcctttcatgagatgctattcattttactttggacctttatgctcagggaatgtttacatagatttggaacaaacatactagagagatgagtggttagttaatctgcccttagggttcaatggaaggtgaagggccaaacaaaggactctgttgaatcctgtactgcatgacattttgcacttaggtaggcactcttccatgtaaatggatttattaaatggggggatttctgttatatttcacctctatcttagcagcactgggtaggtaacattaggtgctcaattcatgtttgtgtgatcacataaattgagtactagcttattggtgtttcttgctccaaaaacataaccttcatgacaatatagactggaaacattacaactaaactctataaaataagttttgtgcagaccttgcttatgacacacactgtctctctctcctgtggatcccagaccataccccaaggatcatggtcatgtttagcaaagacaaaccatacaacactaatcttctcaaacttctgcaggcatggaagtgtttggttcataatatggctcactcatgctaccttggcacttgggaggtagaagcaggattattgtttcacatttgatacttttctgggttacacagtgaatttcaggctagcctctgatatggaattagacctctgcttgtgtcagaggtgggaagcaatggaccaagagatatttggtgcttgttctctctgacaagtaaaaagctcaagaatacaggtggtctttgatgctttacccaaccccttatggaaccagaatctgtgtccttggctcagcgtagcatcatgcttataaaacatgcataataaaattatacaggttgatttgtgtcatttggtaaaatacctggctaaagacaaatagaaaattcttttgacatctaaatgtttacagcaatgtgtttcagttcagattgaaatctaattctttcaattaaatcctcttcttccaaagtaggtaaaggctccatgacaataacaatcaaacactatcaaataacacattatggtttggttgttagacagatattggttcatgtaatcatagtgatacaatcaacataatgcatagattgatccaatccaccaaagaacattaccaagatttgattgtaattttctctcatccatcactcatccacttgacatgtctattgtgtctatatctgctggctataaacaagaggccatgcttaaagttaagaatacaaagatgaatgcaaccaagattctattatactagcaaaggtaggctcaaattccaataaatgccacataatcgactcaaaattcaataggagcataaaaaagtggtcaactagttgcttgtcaagcaataatgtgtttcacacagtgagtagcaatttttctaagtctaaaaggaaatgaaatatagtgactgatagtttcatgattatattgtcattgtgatcaaaatttccaccgagaaaaaaatcacatttctgtttctctgaagcagatctatttttaaaaagccaacatttgagaaacactagagacaagacagaaattttaatttctcctgattcttttgctgtatttaaaaacctttcacaatttttatggcaagcaaacccagatttgccacctaacagcaaacatctgtgtgctgactaaactgtaagagagtgtgaatattgctagtgttcttcatagacagttactggatgttccggtgacctctgtgctatttaaacatgaatcttaaagctcttaagtgacatgtatgtgttttctcattgctgtgacaaaatacttgacagaagcttgcaggagcaaaaggtatgtggttcaggccttcaaagaggtcaatccatttgagcagggaatgaatggaagagcaaagccactcaagccactcatagtatgacacccaagaagtagagagaaggacagttgttgctttttaaacactccccaccacacacacacacacacacacacacacacacacacacacacacacacacttcgttctgttcaggaccccagcctgtgaaatggttttgcccacattcaggttggagtatattcactcatgtaatccctctgagacagactatctaaccatttgcctttcctgtcttctaggtgattttaaatttggttaagttaataatggaaactaggcacagtatttggggttagcctgtaattccaatacatgggaagcagaaaaaaaaaagaatttcaatgagtttgaggttggcttcccttacatagtaaattgatcaccagcctcaactggtgagaccctgcctcaaaataaaaacaacaaagttgacagggaagagccaccatcataggatagaattactcagtctcatgacttgtaaaatatttataccacagtcaggaaaatatagatgctgtgccagataccagtaaaattgttcagaattaattaaaaaaactatttgcattttctgttaattcaggagaagtatatactgtgctatcttacaccataattttccagagggttttttttttgacaaaactactaaaacatctttccagagttgcagaaacaatcttagatactgatttagtattaagacttcgagcagtgtaccaggaagatctggagcctttggcaacatcacattgctccacggagattacacaagagccacaaaagccatggataacacatagagctcagagagcaaatccaaggctaaaacctttgattaacccccaaattagaaaccagaagtgacctgctattgactagaaagctctgcatgtgctcaaagctacatttccctgggattgattttactaattagtatgcttcttctcaactgcccctgaagtacaagggaaaaaaatgtttaaaatcaacagacccagattttacactagtgaaaaagacattggtataagatcctcactgtttaatatacagatttacacagctagtgagctggataataacatgagcgtaagaaataaatctctgaactcaagagtcaatcatagtatagaaagaaccactaacactacatttgacaccaaccatgcttagtacagataatgacatgttataaaaatgttataaaaatcctgcctttgggatagtaggatatacacataggatataggatagtaattatcattatttccacttttacctactgtagttaatattgctgtctggtttttttaaaagcctgatttctcatgcttagtttaccagttcatctaaataggcaagttagagaagaaggctgatctcaagccatgtgttcccagtaggcttatttactaactcaaaggccaaataacattgactcagtcgatggctttgctgagattttggtgtaaacattcaggacagttggaagcaatatagattagcaaagaacaggggctttaatcttgggaagatcccagccccaatcgtagctctgcttcttgcaagctgtgttcatttgaacacttcacttaacattcccaactcattatctccttgtaaaatggatttagcaacactgctcatttggaagaacacataaatgaaaatgcaagccttaggtaggatctacacataaaagtagatgcccaccctcccattaaaaagtactctggaggaaataactagcaaactcacacccttgcccttcccccatccacacccttctgcactctgccaaaaccttactttgttttgttttcaattcattttctgaattagcacacacagtcctgggattcctgtggcttcttcatacagcacttccttgttttaatgatctgtcaagtagaggaattcctcattttcattactttcttagtgggtgttcttgtgtaaacttgtattctaagacaattataaagtataagacaagccagtgaaaagcatttatgatagaaaggggacagagggacagaaggaaagagggcacattaaaatagggtgatagaggttaaagagaggatgatggggttaagaagacaaaatagcacgtggtttctcccacctgaaagaaggggactgagagaatgaaaaggacttgtaaaggggagaggggacagcagagggtaatgaaaggtgcaaaaatgagcaaaatacagtcatttgtatatgtacaaatatgtgatagtataatgacaccaaatgttttcatatcaattcagtctatatattgatatattgatatatcaataaaataatatattgatatattaataacattaataattttaattattaaaattagatgaggagagcattcctgggatcctcagtagatgcatacaggtgctcatgagatacaatgactcgagtagaggcaggcagaggtcagaaaagaagcttaagttgaatcactcagctggctttagtcattgctttaggttccagctccagtgtgtataaactatgaccttggcccaaatcttcacaactcctgtcttagtctactctcagagagccacagagccactgccttccattatagctcatcagtgacccaagccaaaaagattttattatttagccatttactggaaaagttgatgccctacagcaaggctatgcaaaataatgatttagtgtgattttaaattttaatgctatataaaatatatgttaaatgtacacaaccagaaatgggctaatagcaatattttacaaaccataattttgttgtcttgtttattaggacatatgtgttataaaaactacaagtttaattatgacctttacacacttgtaggtcctgtactttaattatgtttacccttcccttcccctgctacatagttattctggtcttggtccccctacatgcttagtttgtcaaactggcaaagcaagggttatctggaaagagggaacttcaactgagaaaacgcctctgtcatattggactatagcacatctatggggtattttcttgataaatgatggatgtggaggggtagctaactgtgggtgatgctaccatggggcagatgggcttgggtggtataagaaagcagctgaataaagcatggagagcaacccagtaagcagcactcctccatggcttcagttctgtctccaggttccagcttgagttcctgccttgatttccccccccccagtgatggactatgatctagatgtgtaggccaaattaacccattcctcttcatacttattgtagtcatatttattgtagtcatggttcataggatgcaaactataaaatatatatatatatatatatatatatatatatatatagatttgttttaatattttatttaatctaagataatacaaacatatgaaaaattactgtctttgggtctttattttcatttcatggagttggtgtatgttttacctttgtaagtctgaacccaccacagccatgatgttcaatttccacatgtgtcttcagctagtaggtagcatggggcttatccatgacatggcaaggggagaagtggtcatggcaccaagtcttggccagatcaatgctctgaatacagggatataacttttgagaactcatgaggcaataagtaagcttagaggctatgtgaggcaaatcaaggaataaaaacatggtaaccaaatcaagagaactagagagtatgcatgaggacgatggatgaagggaaatgatggcctataagatgaagctgcccagagctatcatgaagtatgtataccaacttgctgaaagttggacagaattcaatgttggtctcccaacattagatttagggcaataattctatttgtaatgtatactttaaagcaccattagttcctgaaaggctagaattatgattaattcattttatctgatcaaggttcctaccagtgtgttcagcctgtagaatgtgctgaaggtatgttactagaaggtgagtttgaggagtacaccattaataaaaagataatgaatgtccaaatgaataattcattgaagatgtaaaaatagacctccctccccttacagtttggtagctgaaaacatttcagcatctctggctgtttgacacttattaaagaccaggatctgccgttaaaggaattaaaacccagtgacaaacatgtgtcatctgtaaactcaacatgtgaccctccatgcattttatagtttatataaaggggagcagagatatgagctcttagtgctactgtccacagttaccctcacacactcattctggtaacagagatagacaactctaataagcagatatacagtcttttgaaccaggtctccatcagaagcatttctacactcacaacatggagttggcgccgacggtcatgaatttccatcattaggatcccggtctgcatacactgtaaggcagcatggttctaattggatctggactgaagaccacctaaggcttcagccaggcttccaagacgtcaggatggcaaaggctgttcagtgcttcctaagccccaggtctcaaagcacacattcctggcatagcttctgggttgtctcttcctcacattttaaaggcaaacttcaaattacctacatcacaggcaagaataacttggggcaaggaagaaaggaaatattattcttaaatttttttgggtttcagagccacgggtgcaccagtgtgagccagctaaagtccccagcaatgatagagggaagaggtatcatatagcatatgataatgtgcacattgtgagacgctgagtgacagctccccaccctcaaggtgtccacactctgtgcccagagcctgtatgttacccccacacagcaaaagatgctcttcagatatgactcagttaaggctcttgagatgaggagattatcctggattatctgggtgacccaatgtaatcctgagagtccttatgagagggcagcaggagggtcagagtcagacaaagaagtttaataacagaagcagagggtaaaagacacagaaagacacagtaagatgctatattcctggtgagaaaccaagaaatacaggtggcctctttactctggaacatgacagtacagattgtcccctagagcagtcacctgagtgtaactctcctgatccattttaggagatttaacccaggactttagagaaacactttgtactctactctgcctctactttggtaatcatttattacactaaaaatagtaaattaatatgcatgcactataatatccacagatgcagatatttaactacttaaagatttacctaacagacttaaaaatcaggttacttacattttgtattcataatacttcttttcaggtattgaacataaaagactccaaagtgacaatgttctcttgtgtacgtcaaagatgcctgttagctcagagagtggggggtcaagaagatactgatgaagtgtgtagaacccaaggtagatgccatggaatctggagagatctgacttgcagtctagcaacggacaagtactagtactgtccatgggccagcgtaaccccctgccacggtcatactactgagtagtacatggttaaacccgaagccaaactgaaaccagtagagttaactttccatatgttcactgtaagaacatgtgtccattttccttacgccatccatcccctgatgtatgaagaactcagaagtcagatccagcgtgagaaaggtacctactctctagcctctccccttctttcttcctgctctatctttaagtttatctatctacttcccaggcctgcgttgtgatgagttaactctgtatccccctatcacacttagcagctgggtcaccacatacatggctttccttctgcaggcagactcatatttgctgtctgtacttcacacgtctttatccaaaagtgacctactctaagtgcacaactcgacagataaaaagaaaatgccacatgtgactaggaagagacttaccaggcctttcatttgacactcctgcttcactagtcaataatgtgcaatgccgttacccaaatagggtaaaatcaggtaaccaatggacctagttaagagataatctacttttcaaaaaaataaatattatgtcctttttgaaaatttatttttgactgatacataaaacatgaatatgtgtatatgtattgtgggagtattatgtattattttgaagtgtgcatatgtgtcataatatttaaatcaggttaaactcgttgccttaatacatttataatagcatggtaaaacttataaaatcccttcattttgctttttgcaatgcctagcagagtattaccacctatagtcacctcctgtggggttgaatatcaggacctcttaccctaactgtgcttattacccgttgatcatttttccccacccctcctatccttccaccaagatttagcagaagagagggtccacattatgccaaagactgaccttcactgttcttcattttgtaaaagctattctctcttataaccaaaagcatatcccttctctctaagttcaatttgacaattaaagtttcagtatcaaatattcatcttctagtaaacagcagttttaattatatgtaggtgttgtcaactgtttgtttcttgatataggtcgtctattcaaaattaaaaggcatgctaggatgagaaggactcatgttttaattttcaaaggcgtcacctacatcaaaaacaaaagccaccattgcatgcatcttccagggaagagctttgatcattttagaaagctatacaaattctaggaaactagagagaactgccatcttccatattaaattgaacacagaagttgatgtgaaaaaaaatgtgctttaactcacagttaaatgatttttaggtgtgattatcatcagaaattcttgcagagtttggaaatagccagattttttaaagactctctggacaaaaatccagctaggcctttaaaatatcaccccaggctccagatttctctacagcaaagctcaagtcttttcctttaattcaggctgaatgaaatcctgctgacccactttcagatttaccagaaggaaggtagctacattgcccctgtccttttctctttaatttttatattactaatcggttgctacagaaccaagtgtccccagactgagcggtttatggcaacaatatacagtattattggacaatccctataggtcaggaacaccatgcagtgtgtgcctcggcgaggtttcactcaagatgtgtactgaggctgcagccagggtcctggggagctggggggcctttagagatttttcactagcatgcctagctggcaacatctgaggtctgagttctttataacgttagaacgtctatatgaagctacaatgttctcacaatggggcagctggctttcctcagaggcagtgagccatgacaaaacaaggcaatgccacagtgtctatgtgattctgccttggcagtcacctaatttttaatcagttacagacaggaacacagttcagtgtgtgagggaaccgcataagggcagggacaacaagatgctggaatcactgctaatgctgtcactgtaacgctgaataacatactggaagactctgaatgccatatgcattttgttctggctgccagaacaaagcactaaagatctggggacttagataacagaaccccaaccccgaaccccacatataccatgattctgaaagctgcaaatgcaagatactccaactgctggcagcattaatttcttccgaagcctctccttgagtcacagaggatgcttttgtactgttttctcttcctgtcttctccaggtctttcttgtatttctgtctgggtcttaatctctctgtgagaatacctgttgcactagattggggccttccttaatgtcattttagcttttttcctttgaagacctcatctcatatatagccatattctgagacatggaaaaactgtgtcaacagcatgtgaactgggaggatacacagttcaatgcatatcaacctattttcttcacaatagctgtcatccatcctgggatttgtaaaaccaaacattcagactcctagtcggattccatacatttttttccgaaaatgctcatctaaattgggaataatagtgcattgctgtaatcccagaatttggaaagtgaaggcaggaggattggttcagggctaacctcagctacatgaagattttgaggctagcctgagctacatgggagcttgcttcaaaaatcaaactaacaaaaactgatatgaaacaaataaaccctaattaataacaaatgagcaattactacaaagctatctattgactctctattgactccagagattgcattgactccagagaaagttctggcaagtacttcagtttcctgagcaccaattatggttttccatatatgatcttgccccttgtgtgaacctcagtctactccacatcatgctttatgctccccactccactccagcctacttcttactccttactgttgcaggcttatcatcatgcaagacttctgccctggccattttcactgtaggtattctgatgtccactgcaaaacttccttattctctggctctaagctctctttaaatcaccattcatccaagagaccttcctgcccatcattctgttaggacggtcctcctctgcccagacactctttgaaccttcactgtggtttccacagaatagtctaagctattatttgagacctaaattatattgttagatccattatttgttctttgcataccatagtgccacagtgtatagcacataatctatatatgtatgttgaattagtgagcaaatgattactaattaagttagctcatgcagcctgactgacagatcagccagagaactagcagtaaatgcggagtctactcttcatgttttacattttccagagtttctgatgactaataggaacagtttgttgctctgatgatataatttcagtaaattactttaattgcattggaaattaccggtaagtgtttgttttccttaggtatgggatgctgcgattgagatattccatctgaatgtttaatggtgaaacatacaaaaggataagaatggataagcttcccagaaattcttgatgctgaaaaattcaggtttctagagttgcaaaggactctctcggttgaggcacactgcttctgggcatcccccatgaaggcaaaatataatccttattgtagtaggacagtatgtatgcacttagttctgagtttcttacatgcttcatgactttcttgtgtgttgaaaatgtatgtttaatttaccagaaaagcatattgtctgtctgtaatgtaaaatggcctcaagtagtgactgtaaagaataaatattccagcaactctctggtctacagcatagtaagttaacaggcataaaataaaaatacatccagtgacacactcaatttgttgattcctttgtgcttggaaatacctcttggttgagagctggacaacctaagttttagagttggatggacaaccatcttaatgtgtactatgataaaacattgaaaccttccgggtatcaacttctttttccataaattgaggtgagatggttcaatttgtcctgtttcttccaaccacaagagcctatcatttgcctcttgttttcactcctcctttctaccctagattcgcagaaaggaataagacatactttgtaaataatattgtgtaataaccatattcactgatgacaggaatgcctatgtgtgattcctatatcatagattgcttccttcatctccagagactcttctgagaatgaattgtattctctcactctgaggcagatctaggagataatatatacatgcacatgcagaggatacctaagtgtagatttagatgcagatagctaggatgttcaacctggaagaaattatgcatgcttccgttaaaggaagacactcaataaacaataaaataagtatgtaccgaaacagctttgtgagctgcatgaaagatgggtgctgtggttctgagactttcccatctataatactgactgatgcaaacccttctgatgctcttgaaggaaatgttctttcctttgtctgaataagggagggtagtataagcgtagttcttgggtgggctcaatacaacccaagcaattccccagttcacagctcttagaaatacttctgtctgggagtttgatagtcttctattataccagccttttatttcagaaaaccaggttcatcttctaacaaaatggctgactaaaaacatgtggataataatagaaagtgcacattttatacttttatttattagatggtctggaagataaattccatgccataaatacagatgtttctgatgaatcttagtatttttcttttcaatttggcagcattttgttatagaagtgaacacgcctccaagcaaaagacagaaaacacccaaaagatgattggtggattttatatgattgtagatatatcctttatattccatgtagatgggttggttatatttctcaatctaccgaatgctcattgcaataagcatttagctgaaatttaccacatttttcaaagcactccttttctgtttctactgtgcttctcagtaaattcctatgaaatgattaaagtagccaggcactcaggtgttcagtcacttactttactttcagcaatccttcttttattctatctcacacgcatcacaaacaatgcctgctaaaggtgatgcctgagattttggggactgtatgctttcttcccctgtatgcttcatcactctcctgagtcaatcagaacttcctcttcctctcacagggactatcatgtcctccttctttcatttggtgacactcttgtttagttgtggctgtctcctcaaacctcacttctcaggtccccacagtaaagaaaaaatcaaccaaccaaataaaaacaactcccctttcttcatcctattcctaagaaaatgctttttatgtattctccaaggttaaatattattaatatgaaggtggatatggtgtataatttactggtaagtaccatttatttgttaaaaggaccttataaaccaaatgcatttctaagtgggagaactttaaacaatgagaatatgtgaaggtgaccaagaaaatggagggatattttcatgattatagatgctttaccagcatatctttaaattgcctcacacaaccatctttcttctggaggaggcatttgggatttcccatcttcccaatgctcttcaagagtattgatgttagttttgaatgacactttacacctttaaaaacatcccagcccttgttctaggaatattctcactaataaagccttctaccaaccgaacctgtggccaacaaaacacaatggaatgagattccaatgatcttgggttgaattattgaagtgtggcttcatcggagcaaacacatctctgctgagatggtgttttcatcctccttcccttgaaaataaacgaataacagcagcaaaacaccccaaatatggaatatttaacatttcgcatggtgaaatttagctttaatccattttttattgactgtacttccctcagtagaagaacagaacagctttgctaacataattattgataggctttgcaaagttttccacagataaatacttgaaaacacatagctcttccaattttaacatttagggcacttttgaatgtttgcaaatattgctgatttcactgtagttcaaagcataaaatttgtgctttaaactaatctgtatcagcatgataggaatgaattggtattttcaaagatggctttgccactagttgtggtggcacacatctttaattccaattattgggagacagaagcaggtgaatgtctgttagctcaaggccagcctggtttacatagtgaattccagactagccaaggctatataataatgctctctcaaaaaaaagaatgggttggcctattcaggattttgtcaaattaaaaaaggtattttattatatttattaaattaaattaattagagcagcctgtggaatgtattgacaatattttccatataataatttatttgcctgaagggtttattcttttgtcaaggataaatggaagagatctttatggcatctaagtatagttcagaaggataatgttgtgcatcttggaactcattacataaacgtggaccaggctgaaacttgaatgtaccacttttccacttgtactagattttttattactgttatattttataaatttcaaaatatttttctacctcatcactaaattagtattcataatttgggggtaattttattcttgttttaactttcaaaatgactgccaggggaagtgaggctggccagattgaagcatcttaaacttttcccttcatgacccctttttatccaataacattttatgggagccaggtacatataaatataaataggaagggttttttatttccaaatcttttaattacacatcctatattttaactaggcaaaacatacatatcaaaagggcagtgtcaaatttcttctaagtttacttttcaatgtatttgagaaaagcaagtgtccctatagacctttagaatacagcctacaatgaaaatacccaagctacatctccactaagaagaaatgcatgagacacattttctggtggctggatatccttccaaatgaaaaaaagaaggtagtggcatgtaatattttatgcttttgataattttaattattctggacactttggaaaagaagcttacattttaactaaatgtaaagctatctgttgctttatctgtagataaagaatcctacaaatgtccacagttgagtacatgaagctctttcaccagtcatatggatattttgaaattaagtacatacaaatgctctcattaagcaaaaccaagatatccacaggacactgcagaaaagctcatgtaattaatgaaggctgagctttataaattaaaaaccaccgtcttctgcacatgatgtataaaaagtcatgcatttaaaggtgaatgttctatctcataagagcacattttcccaagcaaaggctgctgcacaaatatttgttaatgcaaaataaatggaaccttcatgaatcctgtgttaatattttcacccagccagttgaaacttggtatttctctcagaattctctacaagtgccacctgcaggaaaagcgctattcttttgcagctcagtagaagacagtaaatctttaaaatttaatttttagacaattttggtgtacatattattttaccatctatttaagatgaaagcagtttaaagtttacctgcttatgagatagcatgcttgttcatttttacttggggaattgaatccttgctttgtactgttggatgtggatcatctgtagtatttttttgggggggtgttgactgatattttggtttctatcattatcaatactgaggtaactgttccacaaaaatacaaagtacaaaatggcaggcatatgcttggcacattatttaataaatttgaaatcttaatttgctatttattatgaaactgctgtcagcaactcacagcagtttaaacaaactgaagatcgcaacacaacacaatctatagatgtgctaatctggtacatgctgaggaaagataccagaaaaaatattttaaactgtttgttttataatgtggccactatattaccataagagcaggagactttttatgcacagaaacacttcagttcctaactcaggcagttaggacctcagctgaggtactccatgcggtgctctttactgtgccataggcatgtgcactgcaaaatggacatgttgtgtgttcagaagcaaggcttcagtgaagtcatgtgataactcaatttgctgcttcttaaagtagctcagattcattagccattggtttatgaattagctttttgttactatgcctttagatagcttttactgtggccaaatttttcatgacccccacattacttatgaccctcatcttaggaatcttggtggggacattggctccaagctcttggagggtagaacttatgatttattcacttttctatatttggcatgccctttactagaataagtattggataaatgttgtcttgaatcagtgagttaaatcagtctagccatgacaaccagcatcagcaccatatggctttattcagctaatcttatccaagtcattgttgtctctggtacagatagtttatgaaagtttcaacattttaatgtttgcattaaacatcccaaaatttgacaggaatgaatatattttccctgattgattcaaagatgagagtttaagatgggaatttcttctcttgaagacttttgcaaataaataagtaaataaataaaagtaaacagaatgggatcgcctaagtggggataagtattgacatttgtgggtcaaactaaaagggtgtgcaatctacccatctgaggattggtctgctgaaggaaattcatacaggtggaatccgtcttcttccttgggcaaattttgaactgaatgaactcttttgtcttctagtaggatattaaattttctatgctgaaattttcctatgatgtaggccacactttcatcacttgtcaaatcattagacctttggtgaaccttggctactctataaattatttcgttgcaaagataaaaagcttttaagatgttcccagttaactttcaatattcccaagaaaattaaaaacaggaaattgcctataaagtatcacctctttccagggatgtaagtagatgaagcattatctatttctactaaattcaggggcttgtaagtagaccttgcagtgtgatactccacagctctcttgtttcatggctttaaatgtgaaatctcctctactgtgtagaccatcaaatacacaaggtttcttcctgttgcttctgtagctattttgaggagggtcctatggctgttcttaaatatctagccaaaacttcagtcatttcagcaaataaaaatatctccagatgggaactgtatccagctgataatttttcagttggagttctggggtatgccatattgaggcttcattgtctcactggttggaaaagtcaggaactgtaagctacttttggaaaaatagaaagaatcagagatagaagcatcctgagaggtacacacaaacttgccgtacatttaaacatttaaacaacaggtgagtttggacttattgtgaactaatattggatttcaagattcaagggaaaatgtatcttccatggttttgtcctgtgcgttcacttcatcagccatctcaatgctatccagtgctgttcaacatgccagtggactcacacattactgctttcaaaaggagatttcaagacagagccatatcccgcattgcctatgtgacaactagggaaggcatgtcctcttaacagttttaagtatcactagttcagcagagagatgtggaaatcagcatttcaggtgtaagttagggcttatcttcaaaagtacaggatactgggatatgcacattatgactgtagatgaaatatcccccccaggacatagagacacactcggattaggtcactaatgccacagaggagaacttttcacttaccactggcaaacgtctccagggggactaccagatctagtgattgagtctatgacatggccatctgacttaggaaatatctaggctcctgcatcagtcagacatcctggataaacagcaccactgtgaaaactcagttgttatcagattaaatggaaagaaggacctgttaatttaggcttgacttttgtcaacagaatgatgtgccaaggaaggactataaattttgaaacaaggatgctatgtgtgttgtctgcctgaaaattgactcatgcaatattcagttcagaacctgtcaagaaaagacaagtctaccattgctagtattgctagtattcctgatatgaacaacatgttgccgtcataattgttaattctgctcctgatactatgccctttgtgatttgaagtatattttacttccctttataaatttcaaagatactgcaaatatcactttaaacataaaccatttgaataacaggtaattctgtatctgcaaaaatgccttggagttcctaatatgaacacagagctctgctaagtgctgtaggaagcaaaagtggtgagaatctaataaagaaaaaatgaaagtgacacacggacattgtggggagcaaaaggaataaagtagtgtggtcaccccaagggatataactgaatcatgcagagcatgcgtggttgcttctgactcgtgttaggagagagccaatggcactaaagaggattgtggaagatgaacaggactcagtagctcagggtggctgagagaacaaaatgagcagaagtctgacaaccacaatggttccagagattgtcagtgtatccatggggcacctcatggatattcctgaggaagcaagaatatagccttagctgttgtacgatcacagatgaggcaaatatgtaagaaccaagaagagctttagggtgcattagcttctttcaaggcagcaataaaggacgtgaggaggttaaagctacacgaatgggcttttgcttgattggggacttcaggagtgacctagaagggtttaaaggcacagagcctgggtaactagaagggcagtggctccaaaggccaagagaacacagagcaacatgtcaaagctcacaggcttagagtagctgttgcaagaagctgcacagtagggggcagagagagttccagaagagaatcagagttaagatgatttagccacattattggaggctggctcttattttctcagtgagtcagaaactcaaattaccagtagacagagaagatataagcatggctcaggttctgaacaatgttttaagacattaaattccttaatggtacttaaatggaggcttgggaaagtgattactggaaaatgtgaattatttgcttggctgatattccttagagtgagcgatcatcaacaacagtagaaaagtggtttctgaaatgcaagatctatcattattaagaacagaggtaggtggatctctgtgagttcaagaccagcctggtctatagaactagttccaggacagccaaggttacacaaagccttgcctgaaaaaaacaaacaaacaaaagagtatttcctggatgctagatttttgttttttaatcttcaaaatgtattttaaaaattagagaaaaaagcacatttgtcaaatctaggaacaacgttggtcacgtctcagattaaattttcactacatttgtatttaattactttcaaataaataattatattaataattaaattaaatgattaaataaaatacaagaaactttaatgcctgtgcatgcatgtgtgacatagtgtggttggggtagggtgtgccatagcatattttgtggaggcctgaggaagcctcttggaagttggttctctctttctaccaagtgggtcccgggatttgacctcagactatcaggtttggtatcaagggcttttacttactaaataatcttgctggcttaaattttggattttgaatggagaaaagtcaatgaagtgagagattagtcaatggaccattgcatacagagtaaacagcagtccttaaggtctggacccttcatgggcttggtacatggatttaagattggaactaaatggaaataaaaagaaatgcaaacaatggttttaatgaacaacaacaaggactgaattgtccccatttaacagccatttatacacataactggcttcacagaatttactgacatttgcctacaattacatcaacctactttcagggtatgaataacaataggatgtattttgccacctcaaaattggcctctgtaaactccaacagttctaatttatctccttaatagagaagatttagctgtgagacactttaattaatgctctctctgcagttggtagttagttcctaccattttagcctctttaggcttcgtgtgcaccacgtaattctagtgtactaagaagcaaatataggttactgaaaggttacctctcagaatatttaataaaagtaaaaaatagcaaaaccgaaaccctacttcaaatgccagactgttgaaaagccgaattcagggaacagagtctacagtgacttccatgagaaataacagaagcacaggagggaggagacaattccccagacaatccatagcagctggcagctcagcatgcaagatgtcaagggtcaaagacattctggagtgtccggcttccgtgtcctgcagaactgggatgaccaaactcaaggaatccgtagaaaaaggcaggagtcaaaggcacaaggtaaaagttaacatcgaaaggggggagctgtattcagcctcgagaaataggaaggaagggggagagcctttggtgctgaggggaaagtcatttgatggaattcctaacaactgaaccttgttttctaagataaagtaggcaattatcatagagtaaagagagaaatagttggctctgaaatttccctgaaggcctgtttccaagggttgttctccacatggtggcactcttggaggatggtgggacctttagaaggcagggtctagtagaaagaaattaggacactgaagataagcctgaaagatcatgtttggactacagccccaccttcctctcgttccccacctgtgcttgcttccatgaggtaactgtgccctttgtcccatcctccctatcttgagatgctactccaccacacacacaatccaaaataaccagttgcccattggccaaactctctaaaacactgagccaaacaaaattttcctccatttagcaaagtaatctcaggtacttccttacagtgatgggatataggctagcatggaagtcagaaatcaatcaatgctgcctcgacattgctggtgtcttgagatcatgttccacagttatgaactatgcttcaaagcaggaaagcccagtttaaatatttatttactagcaaatgattcattttattagctacaggaacatttaaaggagttaaatagtaagatatttgctgggacaccaagctgaccagccttctctgggctgacagcacaatctcaaaggtgggtggaccattgttctctggaaatgccgaaacccccaagatgcaaaacacacattctcactcctctggtaactgaatttgttcttattcctccaaaccaccagtaagtgtgaacaaagtaaagcatcaacagtggttgcttgtcaagcccaaacccatttacactccttacatgttttcccttgggaaattctccccctttctgagtggcttagtgataagtctaagagttcaagctttgatggaaatcaaattaccctgccactggcgacccagaaatgagtatccaagcaacgctggccaaagagacccgagggtgttgcctcctggggcctttggggagacttagaagatctcttactcttttgaacactctgatatctaagcgtgacttctaggcacatagaatgatctagtgatcacctggggacaagccagagggcagaactgacagatgggaaggtcaaaggaaaagtcagaaaggctatcccttaggcttcatactaaacaacctgtgaccatcggatatgtcacctcattcctttgcattttaatttagctgagcatttgtctccctttgttttcctttattgctaatcctgtcttaacagatttcaggggtcaatggggacatatcaagtctgcatgtccagttaatcacaacttgatcatatagtatcatcttgactttcccattcggccatggcactcacagtgtcttgttgtgctagttaggtgttatgttcaattactgctacatgctttatacagcctgctgtggttgtgagctccccaagcacagacatgttggaaggactctcaagattttaaacacaagccttgtgtgctttgaaagcagacactttgaaagcagacaatacacagaaagcccacttgggcatctacagataaaaatttcatgcagggatgggggtggggagggtggctggctcacaaggtacccatttcctagctgcagtcagtgacttctggaaagggaagagtcagtttcctttaggagtgtggcctctggtcagtgcccctgctaaagtggacgactctacacccacccacatacaggtggcactgatttgattccaggtggcaaaacggtgaaagaaaggggcatgaatctgggagggggtagactagggtgggcctggggaagtttgaggggcacagtggatatgatcaacatacaatgtatacatgtatgaaattcttaaagaacagattacaagtattatattaaaggcctttcccataggaaaggagatgtacctcagaacagttcatctctaatgggctttaagtcatctgtgatttgctgttccacaggaggcgctgaaagcaatgcttcctgtggaataaattctctgacttgaaaagctctctgaagttccttgcttccctccctggttgaatgctcccaggctaactcaccaggaacacgttctgcacactctgaagaacaatacctaatggcacaatcgcttaaaccttttgttttgtaagatgcccatccagaattctaccaggatctagcaaagctaatgaggacacaactaaagccagaagaaatgcattaataactttgaaacatttgcctgcattattccaatcattccaaattatcaattactttggaatgctaatgtggttgtatattctgtaagaatgtttaaaagtcagaggaggtttttgtaaacaatgaaaatatagagtcctgtgctttattccaagaagtacagtttgaaggtccctaatgtgaaaatgcaatataatccagtgacatggtactactgtgaaagttaatataaagccttacaacaaagacatcacacatacccaccccaatgaatatatttgttattgacatatatgcatacaatcctctcattgattttaaagagtcctacatagcttttgtttccttaaatgaagatttttcttctggtttaaaagtatagcttggttagaatgaaaaaaaaaatcatgattaatattcttcaatgaattgatccaaacatcttctctttagaagacattacacataattgtttggggggtatgctgtgagacagtgacaactgcagaacagaaaacaaagcagctgcaacagggaatcactgaaaagaacaaagaaggaaacagggaatcactgtgctcttgaaaacaatggagcgatgccatcaagtggcaaaagaaagaattcctcgactgaggaatggttttcttggacactgccacctggtggctaaaatggggaaatgttttagactcctgtgttacttaacaatggattatttgtttcatgtggtcattaatttaaagcctgaacggcccgcgttgccattaatggagtaaaaagcattaacaacctttataataaaacttaaaatggtgacagaatcataggaattactaacaatgtaccatcactcacattctataggaaacaccttgaaatttatttaatttaagaaataatttggtaactttcttacctaatataaaaatgaaaaaatatttaaccttatactatctattttaaatgaaataaccaaatatttacttttcctttctacatctattagcaagctaatgatttttgctgtttaacccaaatcagagcttatcaatcacataatagataagctcatttatttccatcttcaaaaatgtttctgaagttatctttggatctgggtactggtctaggcacttggaagaacataatgagaagaatggacttagtccttgtcattaagttcttgccattggctggatgtccacatgtagaagaccggagtagagagccattaaggccagagtgaacatgtactgtttgacactggcatggccatgtcaaagaccccgctgtctcagtcccatggtcatgccaaagccttcataggtgaagctcagagggatggcaaagcctttctctgacccaagtgtgactatctgatggtgtgtgtagaaaatgtccatcttagctttctctcccaggtatttatggcctgaagactgctcctagacagagactacttctaatgagatcagccaagccctcctctttgttcagctgtatgcaataaccttgcctccctgctcaactgtctataacaaaccgagtgaacttccagagttctgaggcatctccatcagagagcccagtacactgagcacagctcttctttttacatgtgtcttgtattttttcattccctcatcaccctagttaggccagtccttggacccatgatagtcacggcagacacatacctattacccagtataaaaactaactacagatggaagacctaaatgtgagacctaaagcactaaaactgctagaaggaaacacagatagtaccctacatgatatagatgtagggaaggactttctggaactctctttggatatgaattgaggccaacaactaaccagtgggaccgtgaaactgaaaagcttttgcacagctaaagaaacaattatgcagaaaagaagcccacaaaatgggagagaatgtttgccacctatacatttgatagaaaattaatatacagaaagtataagaactcaaggaacaaagagtcaaacagcaacaacaagcaaatgtcccattcataaaatgggcttgggacctgagaggagagttctcaaaagaaaacaaaatggaaaaaataaaacaacaagcctcaaaatgtgttcattgtcctcagcaattagggaaatacaaatcaaaacacctttgagattctaccttatccttagagaatggcaaagatcagcacaacaactgatcacaaatgcttgtcctggtgtggagaaagggaaccctcagtcacagctggtagaaaccagggtagctaaaacaatcaaaaaaaaaaaaaaaaacaaaagaacttcaggaggtatcacaatccttgacttcaagctgtactacagagctgaagtaataaaaaccacatggtattggcataaaaatagacacattgatcaatggaatccattcaaagatccagacataaatccacacacatataaacacctggttttcgagaaacaatccaaaaatatacaatggaaaaaagaaagcatcttcaacaaacggtgctgatctaactagatgtctgtatgtaaaagaatacaaatagatccatatctattatcctgcaccactaaatagagcccacagaatcaattgagcaggattcatgggagctcctagagatccgggagcttgtagaggtctgaccaagatctctgtatgtgtgctatggctgagtagcgtggtgttcttgtgagattcctaacagtgggagcaggggctgtctcggactcttttgcctacttgtaggacccttttcctcctactgggttgcttcatccagccctggtgtgatggtatgtgtttagttgcattgtagcatgttatgccatgtttggttgatgtccctggaagacatgctcttttctgaggggaggcagacaaaaagggggtgtaggggacaggtggcagaggttgagaaggagagcctgaagagagggaagggaggagagactgtagtcaggatttaatatataggataggaaggtggggtgggggagaaagagagcttgttgctcttacagaggacctgggtttggttcccagcattccaactgtgcagctcacagctgcctataactctagctccaagggatctgatgccttttctggtctctgaagacacctgcatgtacatagtgcatattcatacaccaaggcacacacacaagcacataagataaataaacaaatatctaaatatgtaggttcatggcactctttactgagttctgagaacatataagcatagttgataagtgaggaaaagcctttcttgtggacaattgtgaatggatactagcaatttcattcagcaggactagggattaaactcaaggccttgcccatgctaagcaagtgctctaccactgagctacacccttacccctcattctaccttttattttgggtcagagtctctaatttgcccagagtagagcctcatcctgtagctcagtaaagtattcaccttacagttctcctgcctctgccttttgagacactaggataataacctgtgctacacagcccaatgaaccctaaccattggcagacatgtattgtagtgatgcaatctcagaggtgcctaattggaacccaaaaatctggagtctgcctgaagattggtgtgaatgggcaagaagttagcattatcgatagacagtgggaatgtggattggaagaaaaacagttccatgggcagcccctgaaaaatcaagtatagcaagccaccatcaatccaaagttcaagaaaggcaaggaatgagcgtgcagcagagttcaaggctagggctggcgcagatcagggagcaaagcagaagggaactttggtggaaaatgctctaaacaaggtaagcattctaacggaagtgtggctgcagctcagcgacagagtgcttgcctggctgcttgaggcctgagttccagctccatcatccaaaagtaaatacaacaaataaataaataaacgcatagatttttaccctccacaaaagaaatgtctccatgcaaagacagagactattacagaaaaccacatctgagccaaatgcagaaagcaagtagtgatcgtgcagcactcatctccaacttaacatctagaacaaaactcttgcacctaagcctcaggaaccatagcaaaacagggggcagaagactgtaagctccagaggattgggaaatttgctctgagattatacctcctagaaatgtttgagaagctactacactcatgaattctcattcacatggctgtctaaataagacctgaacaaggacaacaccaatagacgtgttgatatgaaaggagaaacctcatagggtctcaaacctaggcaagaactacaggagactaaaatattctgagagcaggagaaatagcttttcccaggaaagaatccccaaatttgttatccaagacctggtggtcagtcctaaaggcatatgcatacaagtaactatatatgaaccacacaggctatatttacatatttaaggatacacatagaaacacacagagacacacaacaaacatactgacactcaaacacacaaataaacagggggagggaggaaggaagggagataggaagggagagggagaaaagagaagagggaagatgataaattatagtttaatttcaaaaaaggaaagtgtttttaaaaagaaattgatagttgagctggagaaatggctcagggatgaagagcacttgatgctcttacaggggacccaggttcagttcccagcacccacacagttgctcacaaccttgtgtaactcctctctgatgccctcttctaacatccacgaacactgaacacacatagtatacttcatacactcatacatatgaaataagaaataattagtgaatataaaagaagcttatagtctagtaaggtgatctatgtaccagcttatccatcaaagatgcatatgcagaagactcactattctttttttatcattttttaatttgaattacaaacaagattgatttacatgacaatcccagttcccttctccctcccttcctcccctaccaccccccccaactaaaaccctaactatcacatagcctttcttctattcttcacctgagtcaacctttctgctccctcatgacctctgcatccttcctcttcttcccttctcattctcctagctccctccaccctcttcctgtgctctcaatttgctcaggtgatggtgaccttttccccttctccaggggacaatgtttgtctcttttagggtcctccttgtttactagtttctctggcagtgtggattgtaggctggtaatcctttatctataaaatacacatatgaatgagtacatatcatgtttgtctttttgtgattgggttgcctcgctcagaatggtttcttctagttccatccacttcctgcaaatttcaagattccattttttttttcccactgagtagtactccattgtgtaaatgtaccattctttggtagaggggcatctaggctgcttccagtttctggctcttacaaatagtgctgctatgaacatcgttgaacagatgtccttgttgtatgaatgtgccagaagacacactattcttatgcattgctcaaggatagatacatcagtgggcagaactgaacctgtaagaattcctactcttgagaaggctctgaagtaaatgagatcataacagggaccattttaatggaaataatactcatgctttgatatgaaactgaagaagaagctagcagatagaagggcaggaatcagaggccagtgggagaggctacacaagtaaaactattggcatatggtggaaagccaattgctggtaacatggaaagaaaaaacaagtgcagagagagaggatggagcaggtcactgcagcatcttatggaggacaggaacctggtccaagctaagggcaaagaggactgcactaaagagatggtataatagagtaacatttgcatttgcgttgcttcggagacaattaagaggcactgtatggaggttgaatagatggacagatggacataagagagagggcttatatgcatgagaaaaggttctctcctgttggtttttataacttatttgacaccctggcttctgcccttttctttgtttctattatactgttaacctaatgttgatttggtttcttcctgttttggaaatgatgatgatttgctccagcagccttcccaagccaacaaattcccacatcatcctcaataaagctgtgaaactcactctctaagagcaactttacattaaatgtgcgacttttacaaggatgagtttcaggaactcagattcacaatccctctgcatctatagggctaggaggatctaaaagtcccagagggtacatagatgtgacagaggagaaagattctggcaaataatacaaagtccattattcagcttcttcattctgaatttgattacacatccctcaggctgccaaagcaccatggaattgacctttacagaattacaatcacatcccataacacaatgacttaattcacccacacagctgcttttctttattaccattgagtctgaggggacagacattcctgactttctcatatccagttcaccataagattttcaatacaagtttgataaaataaattatcagctgtagttttccagggtggtggtgcatatcaacaatactggaagtaaggaggctaaagggagagggactcaagtgcttgaccagcctggactataaaaaatcctatctttaaaaaaatcaggcttgttgatatggatttcagttgttactttgtagtaagaaatgggactgactggtgagatggctcagcttttgccaccaagcctgatgacctgagtttattccctgagactcacctgatagcaggaaaacaatggttctctcaagttgtcctctgacctccacatgcttgccatcatgagtcccatatcatagatagacaaataaataaataaataaataaataaataaataaataaatgggctggagagatggctcagaggttaggagcactggctgctattccagaggtcctgagttcaattcccagcaaccacatggtggctcacaaccatccattatgagatgtggtgccctcttctggtgtgcagatacacatggaagcagaatgttgtatacataataaataaataaaatctttaaaaaataaaataataaataaataaataaataaatctaattatctaattgttaggggctaaaaatggttttagctatcttgtgatacacaaggaccactcaaaacagtatttgacagccaaaatagaaagttcactgtgccaatgtcaggcataggaacttaggttcaaacttgctgcagcagtcttcacaatggccaagatatggaagcaacccatgtctatcatcatctgaatgaagaaactgggtaattacatatcatggaatactatttaacctttgaaagggaaaacctgttgtgccctctcagatggaactggaggacccctgttaagtgaagccagacacagaatgacatgatctcccctgtacatgtggaatttagaaacactgactcatagaatcccagagcataatgggtgattgccaggagccaggggccaagggtgggtgtgatactgaaaatctgaataaagcatacatttcagtaaaataataagtggatggatttatacattggataagaagctgagtacattgatatcaatgatctgaatgcttgaaatgtttagtctccaactaaaggagggatatctcttatattaaggaatttaaaaaaagattttagacattctcatgaaaaaagctatgaggtaatacagatggtaactaggttgatgtagtcatttcaaaaacaaggctaaatcatacatggtaaacattgcatctttcatttaatttaactatttgagaggcctgtttgcccagtggctgagggtatggccaggagaaaggcagtggccagaaacccacctactgacatttctgggtgccagtttgatgagaaaacgtctagtggaaaaatgggagagaaagagaagcagggcatttatttcaatgtggagataggaggaactggagtagtaagtggtgaggaactccatcctgaggtccccacccactttctcaactctatataagcgaatacctgttacactaaagtgagactctactttgacaggtctccacgactcagtgtggttctctccagtgactaggagggaggtctgggtcagtcctgggaagtaatgggctggactggcccttcccacagccctgactgcccgaggacccagctgtggtgtagcagaagccagaggttttgaaccagacccacaacacattgcaatgaacacctgcgagtaaagttgcttgggcgaatgggtatactgtggaacacacagcagcttccaataccactattatgaatgaatatgtgactgacaggtaggtaagagggaggaggcaagttgtgggggtttttttgggggggtgaggctacaagggaggaaggtggatgcagaaagtttagaaagtaaatgggaatgaggtgcatgaaattaccaaagaattgataaaatattacgttaaataaataaaataaaattattcaaaaggaaactaatttatctttgtctagagtacaacttagcaaaactacctttaaagattgcatgcaatttgcaaagcatgttaacatcctgtctagtacatcttgtctagtttgtaaaagctttatatgtatgtaataaggcccctcaaaaaaattaatgcataacaggagaggaggaaagacacaacctccccttccttcctgtcctgaataagaatggttgaagagtcccagttagtaacaggaagcccccaccaacttcagagttaactttgatttcagaaaagctatgctagttttagactctactatgttgccatgcagccttaccaggtgcaagtaatccaaaaggctttgagtctatggcatggtgtttgtcattcatttgctgcttcacaagatataagaaacctggcagaatctcgcatagtggccttttgatccgttgtgtctaattgtctagcctacttgaacttccaaaaagagcaaagagtatttctattcatttgtgatttccaagccttctctcatgtgtttcttcactgttcttttaactgtccctctaaacaagggtgaaagcatatcattgcaacctacaaaatgtcaatctctggccatcgtgaagctgaacaagtcttttgtcttatgatccatccattattttaggtgtaaatatggctctatttgagcatgttaagtgtaagtgcattacaggatcataggtctgagaaaattcagtgagtttcctttctcctggagcatagccaaccttgcctcttgctgcctacagacagttcttgccacaattatcttgttttcaaaaatgagtgatctacagccaatcaagagcaagtggttcaatcaaaagaaaaaaaaaaaaccctgtttactgcattccctctgatctccttccaagactcgagacacaacatatgccacagggatttcaacccctctgaaggttgttcccttttgactttcagaggtatggaaggcttgaaaaaagaagagagagaaagtagtaaacatcctcccattagaaatgcccagcatctggtttgaggaaatggcattagtaggcagtggtgtcagaattcagatgcagcttctgcagacgacacttatttccatggttgaattccccatgcatttgagaacttgctgcagttctgacttcctgcacagtggttccttcagtttgtttcctaccacaagggtgtgctattccttttctgacacaatacaaactatatagcaagggatggacacacaacagtgaatagcactgacaattcaggatttccctagtttcgagcactgtgataaatgcttgaaacaacttataggaacaaggatgtgttttgacttgtgattgctgaggtttctgtcctttgctgactgtctttagttctttggcccccaaacaagaggaccatgatgatatcgggggcttgtagctgtcatggtagtcttacagtagacagtcacagagcaagatattaaggacaagatatatttttctcagtcatgcccccagtatcctccttttatcaacctgattcttccatgggctcctattgttgtcattgtattatggatctatcaatgggttggtcgattgatgaggctaaaggtttcatgatgaaaccattctcaacaattggttcaactgccgggtgttggtggtgcacacctttaattctagcactcgggaggcagaggcaggtggatctctgtgagttcgagaccagcctggtctacaagagctagttccaggacagcctccaaagccacagagaaactctgtcttgaaaaaccaaaacaaacaaaaaacaaaaacaaaacaacaacaacaacaaaaaaaaaacaattggttcaaccaactaaggaccaagccccttgtgatggatgtgtcataactaagctataatacccagtctggttcatgaagtgagctgcatacaaatggttttaataatagataagtgctgggaatattcaaaaggaagagtatgggaaagtcttactaaggaagtattatttggaggcacagttgctgaatgaggagttcgccatatgggttggggagaaagacatgcaaagattaagagacatactgtgactgacctggtgtctccatataacttcccaggacctaaacaaaaggtttgagttgcaaccatgcaacatacagatgagagagacaactggcaggcatgtaaagagcttgttctgtcttacgcctgtctttgagttttgagtgtttcgagagatgagctgatatttgatcaagagaacaccggtaatctttgtacttttcaaaaagcaatgcacaactggccaataatatgcatagaaagttatgaactgtaatattacttggatacttatatttggaaacagacagagagggagaaaaagaaaaagagagacagaagatgggaattgggcagggcccttttaaaagggaacatagtgagtgaataggcaaagaaggtgctcttagtggcagcagctgagggtgtatcctgtcaggaccccatgggcaggccagtacagatgcctgaatactaacatcatgtcttaaaatttgtagaacatttgtagttatggatctgggcaacccagaacatccaaatatccagttgtcaatattgtgtacaattatcagtatagaacacctcgagaaatgcctggaaatgtagccagaatggaatattagaagagctgtttaaatgtcacacttctaaattaatgtcacagctgaactgacttctaatgacttatctctatgcccaacctgagaagcttcttttgacatgggtggtgattaacacaaagaagagagtgcagaatgctaagccctaagtgggatatacatgtattatatggacacacaatttttacagctattttttcttgatgcaatccatcagacaattttaggagaagacacacgtataggcaaagtcttccttttacttgaaatttacttctaataacaagagaagaaaattcccaagagagtttgccacaatgtctttggttttccaattcattgagcagcagtttcgtggcactcatgatctcagcactactgtctacaagaagccttccttaaaaataaggaattttgtcttctgttccttcatattatctataacacttcaaagcatccatgagtatattcagggaccatacaaccaatccaagaatcagacactggagatcccaaatgtgaaaatttgttttcatcctaaataatctttacctggtgctccatcccatgggtttggtctgacttcccttgacttggttgttaagattctcaacaagaaaaaaagaaacatgaaaatagaaaatgagggaaatgatgaagacaatattgcagaaatgacactgccctctctgttccatctggtagaaccatgcaatggatgcaatggaagtgcctgattagagcatctcataacacaacatttctatttgttgattgtagctcagtaggggtgagtttagaagtattcactgcattaagtgatccagtggaaggtttctaagcagtacaggaatgccatagtctctcctcagagaggctttgtagcagcccacatcggcccctgctaattcatgtgtatgaagtgggagaccccatttccttcctggtgagtcaggaagctgggtctgggagccaacatcttctttgagcacagtttgagaaagcatacagacaagtatatctgaaatctgcacagagctagccctccagcttgccttcctttgtacttgcttcatacatcataaaatatttcattttccacctctgtatcctaaagctaagtatttctatcaaaagatatattttaaaaatttgtttaatgccagcatcttttaaatccctatgagtgggctggttgcatgtgggtgtaatcgtttctcactaataatacagaaagaatatttaaatcatactacaaggtgctgtagcaaagaaacacatttaatttggatgatttcaaagaaagatatttttgtaagtatgattctcttaaatctgactgtgggaaccttattgtcttaaaagaaattgctgaaaaagatgaattagaacttatataacacaaagaaaatatgaacaataaagctactctcctaaccgagctatttataacatatgtatataaattgttaaatatcaaaattattttgtgatttttaaaattttaaatgtgtgtgtgagagagagagggggagaggcgcagagagagagagagagagagagagagagagagagagagagagagagagagagaaggagggaagaggagagggagtgagaaagagagggaaagcaagagggagagagagagaaatgtgtgcaggtatctgcagaagccagaagagggagttggagcccctggaatggggttacaagcatttgtgagccacctgacataggctctgggatctgaactgagttccactgtaagaacagcccataaatgctgtgtcatctctccagctttgatttttttatctttaagaatttttgaagcataagactgtatgtactgtagaatccaggtagatgatcagaggatgaggcatcattctgacagcttgaatccttatggcattcactgagattactctttcatgccctttagaagaagaaattatatggatagaaggagccaattaaacaatttgtaaaattttcggaagtgattccctctgctatgtgtgctaatagctgtttccttgtggtcctaccacaggaaccaaggttcagggcacccattcccagtgcatttactgcgttttctaggctctcttaccctagcattggtttgaaaaatctcttttcagaagttactaaagctcctcttcaattactttgctttctccatcatatgtatgcatctgagagctatccatgtgtctgttggtgcaagtgaagcatcctgggaaaattcctttcatagtaaaaggcattaacatctgtgctcatttttctataatatccaacactccgatgtattcttggactgtcattcattcttccctcacattctgagccagtgactgctttctctactttttacctcttgctttttaaatacaagagacttgtttaaccaaaatccaacactggcacttttgttatcaacagacattttatcccaagttccttttgagcactggtagcttcttctatgagtgttcaccagtttgttatgctcttccctgtctattcctttactttttccttgatttttcctatatcctaactgccttgcttccttgactcattctccaagtctcagcatacatgatatcacctcctaaggcctcagctaacacccatctccactatcatttactcttgtatcaccccagaatatttagcatgtatcaaaactgtcacaaataagtcacatgtgtgatcatatttgtcatccctcaaaaatggatgcactatgagggcaagacatcttttagttttatcactgtgcctccacattcagcaaatggctacccctaggaacacaggttgtggaataaacaggtgagtgaataaaaaatgcatagctatgttattgaatattaattcactaagtgtacggattgcatcttctacctgactctccaccaggccatagggaggttgggaagacacagggaaattcctctgctgctcatcccagccaggacttgacatcccctaagccatatctcactttaagggaagacactgtttttaaaatacagaaatatgaatagtcatttgtttaatgttacgtattctgaacaggaatagaagaagttgagcttccgagtatgattttttctaatattccaaggggtgataaatggaaacatgcatcatcacacaaatactacaaacctcaaatatcttggactgctgttcttacagccattagagtagccaagaaggacagggatttcctggcctctctgcatgtcagactctttcgagcagccaccttgaggtgtccctgttctttgaggatgttacaggttgcgatgaacagatgaccaggactaacttgctgagaaactctgaaatacttcatttcaataatgtgagcatggtttggcattattggttcacgtgataacttgtatggagcctatgatgtgtgaagtcacagagtgactgacagatcaagcaatgctggtatgtgaagtgaatgctcccagggaagtctccatgtcctctgtgtgtggcaatcagtaccatacctgcttctgggagtcagagatggctgctctgtgaaagtgctgatgacactgaactttgaaagaaagatgacagttcacaagagaaactcagtcagaggcggatatgagaaaagcatgttggttaattgatggcgaaccaatagcatagggtgggaaagatagagaccaaccccagtgttttaatcactgttctatttctgtgaagagactccatggccttggcaactcttataaaggaaaacatttaattggggctggcttgcaatttcagaggtttagctcattattgttatggtgggcagcatggcagcatgcaggcagacatgatgctggagaagtagctgagagttccatactgggcagggcatgagcatctgagaccccaaagcctggcccccagagacacatctcctccaacaatgccacacctcctaatagtgccagtccctatgagcctatggggccatttttcttcaaactaccacatcaagaaacagatttgggcttaataatgaaggtgctttccaactgttagaaatatattgcataaaagcattttaaatagaaaccatgcaacattagatttctatccagagagctggttcatgctcctcgtggcttggaaacaaggtataagtatttctgtttttaagtacaaataaatcaatgtaacacaagtagagaagagataaaatgttgaaacaaactattagacattgagaaggggttaatttatgaatatgggaacaatcagagatcatgaatattcttgtcttctgtaatctattacaattcaaatattttagaggcaaggcagggaccatgaaggtatattctgtttaaaagggaaaagaacacattccttctctaagtcaatgaagtgtgacctgtatctcaacacctacacagagcaatggagcagaataatctcatttcaaataaaagtttgcaaggaggaagactcatcatttatctgtgagctaggagagccagaaaagtagctaaaagaacaaagaaatgttctttgatgtccaaagtcaatgttttaaaagttaaactctgctttctaacaacatggaaagcagtcagagaaaccaggcaggacaagtttgtggttgaaaaacagggaagtacagaaccacgtgagcaagaacacatcttgcaagctttataaagcatccttggggatctgcttgcctggaaatcccactggactttggttcttatgaatgttcaactgtagaaccacttgtattatgatggcagaacaagagttagagatgttaatatttcacatttaaatccaaggttcactttgatttcactcaatagaacagaataaatctcttcatgtctcattgtatatgagatcacatagcacaattgaggagtaaaaaagtcaaggatctgaagcacactcattctgtatagtattatagttttatgggtccagtctagcttttgttcagaattattcttctgtgcaaatatggttgtgcgtatatgtccctttcactacttaaaacctttcaagagtgtaaaccctccccagaatatatcccagacctttataaagtcttacaatctggcccctaaaccctggagtcaccacatctaactctcacactaactacagcaaatgtggggtgcgttccttcatggcaccaagcttcctgttctcagaatcccagaaacactgtttctcggaactagagtgtcctgccaagtagatgttcacttaacaggctccttataattctatcctaaactcaactctccttgactatgttaagtaacaagcaagatggatcctacggatgctctcttcctggaatgcacatcttctagcaattacccttctctactatccgcaccaatctctatgaccaaaagaataagataagaagatagcatgtgaccttcaagggtagaacataagatacctgctgctcatgcaattcactcttggatcttttgtttggaggtatctgtcaacttgtcctgtgtgtgactctaatggaatgatccgtgagggaagtgttggcaccctatgctagcagtcaacagaggttaacccttcttggaagcagagccctcagccctgtcaagcctttaaacactaacaacttcctcagaccctgagacagagtcaagttattcctaaattcttgcctggcaaacaaacaacttcacagaatgttgttttttaatctgctagtttgggtaacaattcttacaccacaaaaaagtaaccgttgtgtcttttcatgctggtttcccctggtacacaatgtaaggagaccctatcatcccatgctttatgatatcatccattctattttctttctcacacacatacatagcctgttatcttacttttattaggttggttatttcttgtctttctcaagtaaagcttaaaatccttgaaggcaacaatttggtctgtctcttttatcaaggcttatgatcagaactgcgtcacctagacctaataatcaatgaagatccatttaaagaataatgtaccactctgagatttgtatttcacttgcttcttaatgatgcgcagaagtctatgagttgagtgtctaccaccagctctttgatgttctagctatctcagattcaacacaagacacaggagacatctatgtcccactaggctggggagacaagcctctcagatactttctaagtaaagctttatgctctgtactgaagaccagataaagatacttttgatgattaacattgtttacaaaggttttggggagatgatatagtctaatagaaatgcacagggtgtagcaaagatgacatttagaaaacaagaggacattggggaatatgttagggtattagagtcaaggagatgacataaccatcataaaacaaagacatgcagaggtacaaattgactttcatgagatgaaaattcaattcaaacatcaaaaatacagtctttaatgagttaaatcaccccggaaatttgtgcctgaattgtgtagaactgtttttaaaatccctcattcagggagaatggttctagatcaaaccatcatcttttagtaaaaagcatgccttattatttagcctaggaacatggattcctacttcacaagcatacaataggcataggatgtatgtacagtttcatgacccaaactggaggtagaagatcagtacacagtatgtgtatcccctatattcacagcttgtacattcatgccatttcttttgagttagtgagggaaactgagtcctctaggcttttttccaggaggccttttcagcttctctggtttgggtcttgctattttcaaaaacttcacagatgcaaaacctccttttaatcacagttccaaagaatgaagaattaaacatatgcctatccaccctcacccacctaatatgctcctacatggtgtgactttccagttatattgcctgggaaaatactggtatccatcatatagcataaaaacaaaatattcaggatgctgaagctggataactggtctgtttagatggagtcttactccagggcagcctgagttctaactcagaattgtcctgcttcaagtggcccagtgataggtcataggtgtaggccactatttttgacttcccatcaacatttttcaagaaaggaaaaagctactttcctaattttggtcggggttattttctatgaaagtaaacatcttggggagctataggcttgtgtgaacatgtcaaccacacattttcaacagctggataatggcataagtcttaacaggcaaacatgaaaacactagcattcgcccttttcttgtcctagcattcaagacacacactgacaaaacttctctccatttaaaactgctaagtatgcttccattctgagaaattgcattctattgcattcacagcatcacagatggaaagtgtctcatattttgaacttcacatgttttgagtaatcttctcactatgaacacaacttagcagcagttccctgacaaaagaagtacagtctctggtgacaagaagagacatggaattctgatgggccttactaagcagggaacacaaactatcttcggaaaaaaacgagtctctacatagagatttaaatgataataaataaataaataaataaataaataaataatacaataaaaaattataaaaccccaaatataaaagacctacaagtgctcccaccagggacagcaaacacacctctgtggaatttttcatgggaagacatgctttcataccaaacagctcagacagagagagcctagacactttccacacaacgaacagcttcagaagctgcccccttgattcaaaagacatgaaggggaagggcgccagggctgtgatgaagaatgataaagatactttctatctctgggtgtcaaagccagctcttctgaggaacagttcaatagcactcgctcctcacttttgccagctggagtttgaggagtaattgaggtaacagagagaatactgttaaaccaaaatgtgatagctatgcttgaaaggcatcttggcaaatgagccctaccagtgaatttaaaccacagtgagagtgcatcctcctcaagcagtgtctggccagggaaagcctagactatcttcttttttctatcttcagcaacttagacaacaaaaacagcatagagagaagttgacactattttacaggtgaatataggtttatataactcagttctaaacattaaaaggatatatttctttttagaaaaaaaaaggtcgacttcaggctggagggatggttcagttcacaaagtaaaagtgtgcatttgtaatttcatagatggtaagatggggaggggagctaggaagatctcagtagccagctagtctcatctactcaaatttacagagcagtgagagtcctgccacaaacaaagggtggaaggatattaaggaatgattctggaagttgtctttggacttccacatgcatgttcacacatgtactcacatgcaggctctcatacacaaaggtataacatttgaaatgaaaggggaataaaaatgtctatttgtcatcatatggcaacaaaactcaaataaaccagtattgctatcattgccttataaaaatgccaggtatggatatattaacatacttatgtatcagctcatttatatagtcatttatttatttatttatttatttatttatttatttatttattttggtttttcgagacagggtttctctgtggctttggaggctgtcctggaactagctcttgtagaccaggctggtcttgaactcacagagatcctcctgcctctgcctctcgattaaaggcgtgcaccaccaatgcctggtttatagtcatttattattagttcattttgtaagtagtgaggagtgtaggctgcactaagatgaaagagtctccgtaatgcaaagattgaacacggcagtatgctctaggccaggctctgggatttgtatcactcatgatgcacaggaaatctgtgagtaaagctcttactaccagcttgcctcaagattagaatgcaaagctagcccagccatagaggccaggcagtgggggtacacacctttaatcccagcagccatactagttagccatagaagctgggtggtgatggtgcacacctttaatcccagaactagagagatatataagacagcagcagggtctcagagctggcaattagcctccagtcacattgaggattggattgcccctgccttggtagagctaagagctctctggtgacttggctgctttgcttctctgatcttcaacttgaactccaatatctgtctgctgggtttatattattcatgctacagtccacagagaacacataatcctcacctgacattggcaattgactttgacaaagcagaacagctgccttgtgtttgaatctgtttgtgagaagcactcgaacataagcctacaagcttaggtatgtggggcagattgtctcatttctccataatggaaacccctgttttaagtacttaacatgctttccagagaaacaccatacttagtttgacattctttgtttcacctctagtaacttccctcggttcttatgggctttgactacttgaagactgagtcctgagaaggttaagagttcctgattttcactgttaaaatagtggaaatattacttctgagtttgcctagaaagctgtttacacagatggctgcttctacaacttccctttaaaaagatacaaagattggaaaagaatgaacaaacagtcttcactgtgatacaattctgctttgtgctagtttttgctgtttggatgtgataatttgaaatactaatttgaaaaaataatatgtagaaaaaaaagaatattacaaggcaggggctagtgaagtttgtacatctgaaaccaggatttaagggctatgaaatgtccacataagcaggtcaagggcagaacatcatttcaagtaggtatcacccagagtgcaatgtgactataatcacaggattcttccagtggcattgacttcaacaaaatctaccccggacttgggggaaataaactattcacctggagaaacactgcattgccatgtaatccacatgtacagtgacgttcagcacttccctccacagtcagaattcaagagtggggctaatttgaagacagaggatggttcatcaaaaaggaagaaaaacaaccaagaacaaagacaaaggaaaggagggtgaattataaatggcaggttagcaacacaatgcattatggtctattttcctctgatactcccatagtttctgccagagtttacacaggaagttacactgtgtgcatctcatagcactaagcactaaaaccgcagttctacttcttgggccatgggaagaagctcttgctctattaattcagttcagataaaacgaaaattaactgaagatctattataaaaagaccattatcccacatgttggaatcaaagcagtcccagtgtagaaatgaagaaggcaaccatgcctgtagaagtggtatgtgataccacatagtgatgcatacattagagcctccaaagaagcatagggaattggcatctagtcgacccagagagttcaagaagttttctagaacacacaggagagagtacaaaagtgtaaggtaagtgagttccatgtttgtcagaaccaaacaggagattgcaaatcagaggaagccaggccatagcagaagaatacatttttaacatcattagcaagaatgcaaatgtttccaaagagccaaattattaatattacttcctattaggcatatggaaaactcatgaaactggaatctggagtgataaacattttaggtttatcatccaaggcataagctgtttcagtggagccatatgtaactgctatttttaatatttaacacaaagaaatagcaccagtgttcagtaagaagtaaatgctggacatacttgactggaagtaatctggaggcatataattatatacaatcatatccatgtataatatgtatagaaatcttaccttagaatgacaaaaaactatatatcaggtaacagtcatgaagatcattacaaatgaataatcaatattcatcaattataagtagaaatgatctgttgcaattgtgaccaaagaaatgcagatctagtttatttcttaagttccttcttcagcatgcacaagcaaatacacatacactcccaggacacacacaggacagtttacgattatctcctttttctcagcaaaaactattgaataatgccctattgtgggaatgcaaatgagggatttagtttctttaaaagattggtcaacactgtaaatatcccttggatccagctattaagttcaaaatgcgtattcacacacaagagggcaacctctttcaggaaaagtctcaaccatgtggagtgacagatgcacgctatgaaacagtccccagatatggagacttacacaacagagcaaaggtgactggcttacggaggttcttccaggcaagaggggatgtagttaaatatctgtccatctggcacttttgggaaaaaaaaacacaaagcatttataaaagaactaaatttagatgagaaaactttttcatcaaaaatgataaaattgcaacttttcctccaagcacatgtgccagtgttaaattggagactaagccaaaaatggcatgataggggcaacagcctggactctatctacagcatcagaggcagtgctgcaggctagaagagcctctgcatcacctagtgaaggaaaagtgtaagaataaacagactttactgcaaagacataaagagaagggctttggaaagccacaaatgagtcaagacagacagctgagaactacagagctccagaagggtaactatctgaaagaagaaagctgagctgcccataaagctccagctacaggaattcccagcaggaaagggaagtgaaagcctcagctaaaggtaagccagtcatccatggtgaaaaagactggctgtcctattgatggaagcccacaactctcacaaaactaaagtctttttgtgggtattgatgagagtaacttttctggtgtgacaagttggaagtagagatgagaacccataattcagagggctgtggttgcctaaataaggcctgtacagtatcaagtcagccaaaattccagcatggctagagagaggttcatgaaggcaacctgtagccaagctattgtcaactgatagttccggaggagggagaattagttttctttagagatgtgttacctggtcctttgcccacgcgctgctgatgaattcatgctcatgtacatacttgaagcactaactggattcagaaagttaaaacagagtggagagggcaatatggtgagggagtgagtcttggaggagttgcagggattgtagaggggggcaatataattaaaatacatttaaggaatataatttaatttatgaaatttatttagaaaatttaatgaataaatagaaaacataaaagtatcacagatatatgaaaataaaagagcaggttctttgggtaaaaaaaaaagctagacaaacccatagccaatctaatcaaatgaaagagaaacatccaaattaacaatttgaagatgaaaaggtcgacattataatgatttcaatgaaatccagaggatcaatatggagcactctaaaatgtatttttccaaaactagaaaatatgaaagaaataaactcctgaaaacatcttaacaaaattaatacaaaatgaatgagcatttgacaagatccacaacaagcaatgggattgaacaatacgagtctcccaacaaagaaaattccagcatcagatggatttgctcctgaattctatccaatggttaaggagctaaaagcaaagcttttcaaactgttccataaaatacaaagggagggatagtactgaactcattctgtgaagccagcatcaccttgatacctaaggtagataatgatacaagaacaaatctatgaaccaatacttctgatgaacatagacatgaaaatggtagtaaaatgctcgcaaaggaaattccagaacatattaaggagatcacacatgatgatcaagttggttttattccaggatacaaggatagataatttaacatatgcaaatcaaaaattaaacacaacacataaagaaacataaggatagaaatcatatagtcaactcagtagacacacaaaagatctttggcaaagtccaaaatcctttcatgataaaggcattgaagaaggtgaaaatagaaggaatttaatctcacagagtaaaagacatataggacaaacctaaagacaacaccattctaaatttggataaaactgaaagtgctatctctaaaattgacatatgacagtttaccactttctattggtcaatatagtatctgaggtcttaactagagcaataggacaagagaaagaaacagaaaactaatacaaagaagtcaaattattgtattttcaaatggcataaccctataattaaaagaaccaagaacacttccagaaaatatttagaattcataaacactttcagaaattggacaaaaaatacaaaattataaaaccagtagctgttctgtataccagcaatgaatttgccaagaaagaaatcagggagtaaaatcccattcataatagcttcaaaaaatagctaagaacaaaactaaccaaggaggtcaaacaaatccacaataactgtaaaacagtagaaaatggacacatacacacccttaatgtcacaatcatggactagcagagtaaattggaaattgctttaaaactgaaagtaaactagagcaaacaaaataattcctgtcaaaagcccaatgatattcttctcagaactagaaaataatgatcttaaaagtcaaatggaaacaccactaatcacaaatagccaaagtaatactaagcaaaatgagcaacactgaggatgttacaacacctgatctcaaactacaaagccatggcaacaatagccatgacactatataaagaagacacagaggacctgtacaggctaacacagaatggaggacccccaaaattattgtctagaatatataaagaactaaaaagtattaatactgtaaaaatgaactattctatcaacaaatgaactaatgaactgaatgaaattaataactatgcgtccaaaaaaaaaatcatccagtatccttagccattgaggaaacacaaattaaaattgctttgagattccacttcagcccagtcagtttggctattactaagataacaaatgagaataagattgtaggacatagccattgtggagattatagtgtaccttcctaaaatacaactaccatgtgattcggctttaccatacctggtatattgttgtagttctaagtcatctaggggatactgctcatctgtgttcatcgttgcatgaggcatgacaaccattaaatggaacctgcctatatgtctatctacagaaatcacaatggaattttactacaccataaagaataatgaaattgtgctggaaaaattggtggatttgggggcatgctgctcaatgaaataagccagatttgaagaaacaaatatcacatcaataaatttcatccatatgtgaacctagatctaaattcatacatatcatatcataatacacatatgtgtagaacatgaaaacagaaaaggggctgtgagaggggaggaacgcagggaaataagagggtagtcgaatatatatggtttgaaaacagaatggggggactattggggatgaggttcatcactgaggaaggaaaataggacaaatgtcagtgggtgtggtagatatattataaagtatatatataaaaatgtcacaatgacagttcatgctggtgagaatgtggagcagggggaacactcctccattgatggtgggactgaaaacttatgtagccactatggaaatcaatatttcagttcctcagaaaattgggaatcaatctacctcgagccccataacacccttggacatatacccaaaagacactcctagggcagacacttgttcaactttgttcattgtggctttattcataatagccagaaactgaaaacaatctagacgtcccttaaccaaagaagagctaaagaaaacaatggaaagttactaagtagtttaagaaacaacatgatgaagttctcaggcaaatagatgcaactagaaaaatatcatcttgagtaaggtaaaccatacacagaaagacaaatatgatatgtattcacttatcaggggatattaacagttaagtaaatgataactaagctacgatgtgtagatccagagaagctaggcaaagaggcgaactctaggggggacacatggatctctttgggaagggtagactgggagcaggtgaggacaggagcaggagagatgaggtgggaggttgtggggagccacagccccaagatggcgcctggctggatgccagggagaccgagcttagctgtaaacaagccttatttggaagcacttagtggatctggtgtgcctccttcagctgtgacctatcggggatcgccaggtggcatgagctaattcggtaatgagcttgcttttaagggctggggggggggcggctagtagaggtagaagctgagggagaagtagaaggagaagctgatgtacaaggtccctgaataaactgtccttcttgctggtcgagatagacgcgacaggaggtgatggaggaagagagtgcagagagacagatggatttgggggacaattagtgggtggtgtggaaacctagtgcagtgcaaacttgctgaaatataagatggtgactctagtgaggactcctagtgatgggggatgtagagtctcaactgtctatcccttgtagccaggctacacttccagggacaggactgggttacatttggttgagtctctggccaaggagggcccatggagccctaaacaacccaggctgatactaggacaaaaggttactctctgaagactgacagcagggccccgttgtcaaggacaacttccacacagctcattaaacaaagagaagtttacctggtttgggttttgagcattcactatactgtacaggttacagaaagggacacagggacaccaacctagtcacaaaaccctccacctaaatttgtcctgcctgaaagatgtgctgagaaaacactggtgcagaacttctggaagtggccaaccaatgtgtttggtttaacttgaggcccacaaatgagcgggagatcatgtcctacactgtttggatggccaggaaccaaagaccggatgggccagagaagagacctacagttgaaccaaacatgagtagtgtgtgtgtgtgtgtgtgtgtgtgtgtgtgtgtgtgagagagagagagagagagagagagagagagagagagagtcaatgaaattattcctaatgaaacatgatattctgctatacgcataaatcagtgccttgtccagttgtcatcaaagatgtttcctcctgcagcagatggtaatagatgcagagccccacagccagaatgtcagagagagaatctaaaattggaggtctctgttgagtccctctcctcagagaccagggaacagtacaaaagagggaacaaaagactgtaggagttagagggggtggaggatcccaggagaacatagcccattcaatcaacttagtaggacctgcaggtgtcctctgcatatatgacggctattaacttgtgagactaacagtgggagtggttgtgtctctgactcttttgcctgctctgaagactctttccctgctattggattgctttgtccggcctcgatatgagggtgtttgccttgccttatcttgctttgttctgtttggctgtcatctcttggaggcttgcttatttctgaaaaggaaacaaaggaggcgtgaatctgggggaggggggaagtctatatggtggcaaaatatgtctaacataaaattcccatctcaacagtaacaggagcatagttcaatagctaaggtcattcacttcattgttcaatctcctgaaaatctccattttgtaagactgaaactctatacctactacatgcttctatgaatctgactattcaaaaacttcaagtaagtgaaatcatgaagtctttgtcattctgtgatggccttgtttcacttggcataatgccctcaagattcctcctcatgggagcacatgtccaaattttctccctctcaaaggctgaatattaatccactgtgcatttatgcaatattttcttcatccatatatctgttgacagatagttgggttgcttccttctcttagctactgtgagaagtactgatataaacaggaatgtggagagctctctgaagccatgctctcatatctactttattctcctgcctcttccttccatcaatcttcaggctcttaagattttgtgttgtgtgcactctctgatacactgatacctacagaattcagacattgtcttctgatatctgacacctacagaattcagacactgtcttctgataggctggttttattacttgtgcctgtgtcccttttcctgaattactaacccatcacacacttcatcacaagtgggcttgctcagggctagcactgattgggagggaatctatcatatagtcagattgctggtggcaagtcctggtctggcacttcctagtcaaataaccccaagcattttatttaatctctatggtcttcattttttttaacctgttattttaccagcctcaatgggttaccatagaaatatgttatgatgatctgttgcaaagaccctgaagaatctcaatagtgaccaaggagtatctacaggttcagactttaagtctgaatactaaaactaaggcatttctctgtaaagacactaattcaggttagtagcccaattgttttagtttgtcatgtggttcaactgaaggttatctgtaaagtctgccatcttggtctgaaggaagcatgttcagttcaagactagatcatccagtgatggggagactggctcaggcatctcacacatcctccactcacctccgggaactgagtttaacgagcagtcatcacacctcagggctgttcttagcagtgagactgcacaattctgatgacagggatgacaggaccaaacatgctgagtccggtctactaaactactggaacaaagtgtgcccttacatcatcatttggacatttattattatagaaaaacactgtggtttatataacacagcttttattttcacacacacacacacacacacacacacacacacacacacacagagagagagagagagagagagagagagaaagtgcttcctttgaccataacatcactaactaaactttaattcaggagaatatgacaaatggtgatttactgtatttcaaaaacttaatttttaatgccttcatatctattaaaatgttgtgaccagactatggtgtccacatttctgatgctcaggcttagattctgatgcaaatgtttctaattaggagtctcagcattgtacaattaacacccacatttctaaacagaactgaagacactgttcctaaaactatgttctcaagcaagtgctagttatttggactattaagattttataggttaaagggctgacaagatggctcagggggtaaaggcaactgcagctaagcctctggacctgactttgatcctcaggacccacagagtggaaagaggggactgaaattcacctggatgaactcacacccacattgatacacatttgcattcataaataagaaattcaataaagcattaaaaatattctattagctaaatagtgtacacagctaggaaatacaagagaatattccctctgggaaatgatgctgaacagattaatttctaatttggaaaaaaagaattgagaatcacattaactttgtatttactaacagtgtatattaaaattttgctcaaaatatctcacataattaatttttttcaatttctaattgtattttcccccttggttttgtgagactgggtttctcctgtagcagcctgactgtcctggaacttgctttgtagaacaggctggctcaaactcacagagatctatctgcttctgactcctgagtgctggggttaaaggagtgcgacatcaaggcctggtgaaatgtaattttgttttaaatactctttcctggatgccgctttgttttaaatgaataatagacagaggcagatattccaagattcatgaggtataaagagatgaggaacccagtaatggttccacacatcgcgtgtttggaaaatggactcaaatgggtagtttgcttttttttttttttttttttttttttttttttttttttttttttaatgccttgtgggtgccagttctgaggggttagtgtttgttagaaataatcccagacttgcattcttaaaacaagccatgagagggcgccagaagccagacttaaagagatgtcgccgcctttttttttctttctttctgttctgttttgtgtactcaggagtagcagacagtattgctctgagggctgaaaagctgccatcgggagagtgatgtagaagaaatgtcttacacggccctgcggtcgccaatcttttacttggcaaactcaagagtaaagcaaggcccagcttgttcctgtttaacaacgtggaatgaaagaccatttcatctcagggctgttaagtccaaatcgaataatgcctaagctgtttggttcaagccatctcaagtgctccagcaccaggcaagcctttcttcgccgatgataagccccattcccactgttctctccgtgcatacggcttgaccctgctgattcccctggcgccccttcccagctggagtttccaaatcaagactctcagaaccatcacctggctggcttgacaattactctgcgggtgcaaattagcccatttgcttcataaatttcaaacagtgccttactcgttctacaaaaagcaaaatgctgccacagcaaaaattatacgcatctgcctacgactttcctctaagtcccgtaccctcctatgccagcgatccaggcctgggtatctatgacccacaagatcaaaggccaaacacctattcctgaataaggctgacaatttagcgtatgctaattcccttccactgggccctggtagagggaggaggggggtctggtagccactgcaactgtgtaaggtatcccccgaccgtccatccgaggatactggttttatagttttctaatcaacttgttgctggtaagcaatagtagttcaaattaagcaaagccaagggagggcgtgtaatttattcaaagctgcaatctgtttgttgcaagaagccaagatcgtgctgtgatctgcccttcatgcgcaaagctcgcttgcatctcccatcctgaggggtaatctctgctcagagactccagacgattagcacactttctcttcctacatccctaaccgaagcagctttgtttgctatttgtacccaaaggagtttcgatgagaatggaagacggtactaatgaagcagcattttctagggtcagtagtctaggttcaagcactagccacaaacttcagagggaaaaaaggaaatgcaatacaggctggtgtaagggattccatccagtgccacctgtattagataatccactgaaagcctgtattagataatccacccacttcctgtttctcacactcgatctatcccgttattcgaccccctctgtggatccagctacacagcatgcttcctgtttttcagaataccaacctctctccctgcctaggttgctcttctcgcgctcgccccctgcaaggctttcctatgtttaattcaaagctcaaagctcacctgtttcagcttcccctaagcatcattcccagtcctgtgtacatggactcatttcttttcccatcgtcgctaagccaaggcaaattcttgaacaatggggctcttatctcttgctcactaatgtgcatccagagcccagaaacttttttgtatgtgttattttattagatgctcattaaataattgatttgtgactgacggaatgaggtttttctcaaacacttaattgtactaaataattagtataagaaaacaacactgaggctcccatcttttggggattagctaatgtgagaaatgtggtgtatgagagaaacaatagatgactgtactgtacaagtgttacatccagacagaagaatgggtagtctggaaagaccaatacccagatgatgtttccttccttctaaaagcttcaggacacacccagggagccttcaaggctacctgcctagtctccatccatacatcattatgttatcaacacacaaaatccatatcttggaacaggaaaaggaggaaagcattaatccaggggacaaaaaaaaatggatgtggcattagaatacatgagatactatgtgaacatttagcaacatcagaaaagaataggcttgtgactgctggacttcagtgatcaccaaaggtcacagcttcagaaccttacacagaaaggtaagacttgtgactactttgtactggccatagactatgtaccagccaaatgagctctttgtctcagagcaccaacaggaggccatgacatttatgattcccgatagtccattgctcagctggtcgatattgcctccctcatttattaagcaatgtggtacacacacacacacacacacacacacacacacacacacacacacagtgccggggcctgcccacctgtttaagtgtgcctgagaaggggtgtgtggattaaggaaagaaatatacaagagacaagagatagactcgggaatgcatccagtggatactgggatcagccccaagtttattacttaaagcttttatataccacagtcaaaagtggggaaggcaaaagacttccttaccaagatacaaagaacaagcaagcattaattacctccttaacacctaaaacaccaagtaaacacaccctaaactaaatatcctgttatagtggtaagacatccattagttactccttaggccaaatatcctattgtcaagacaacacacacaatagccacaccttaggccaaacattctgttgtttaactttgaatgagcaagagtgggtttgaactctttgaccttaagtcaggatgaaatggagccacttcaatgggaccggaaacacacacacacacacacacacacacacacacacacacacacacacattctatatacacagacacattagtatatatattgagagctgaggattgaactctggaatggactgctatccatgcaaaggagcaattcagagatatctaaggtgagtttcctagacatttacttacacacagggatacaggttaagtactcatggctctgaatccaatttcctagtgaagggaccagctcccctttcggcagccataacagccaaacacgtgcttgccataaacttgctttggtcacttagaggtcagatgcctgcctcatgacaaggaaacaatcagaagttagtcactagaaagtcagatgcctgtctcgtgacaaggaacccatcagaagttagttagtcactagaaaatcagatgcctgccttgtgacaaggaaccaatcagaagttagctggtggcgctatgctttaacgaccctgggtgtgctttacggacaagcacacagcaatgacgcacaaagcatagcaaccactctgggagggcctatgggccataacaaccagttgaccaatcaacacagggcaagccctctaagcctggaggcacaccaatcgtgagcatgtgcgtacccctagacactccccttacgctgccctacaagatctgtaggcagcgggttcgagctgtcttttctacccatcagccatggtgggtgggtgaaagacccgagctaacatggggttagctcgttaaattacaataaagccttgtgcagtttgcagcaagctcttgaatccgcctggtgattggggtgaccgcagtcgtggcctgggaccccggatacctgagttttccgggggtctaacactagaagatagctttacatttgtctcatttctgatgaatttcatcctaaaagttgtgaaagtcagctattctttgttggatatagaaatttcctaacatcttttgatcccttaataaaaactcccagtatttctcaatttaaacgcctgttactttattcaaattattacatcaaaacaaaagaagtacctcgaggagaaatgaaggcatggtaccctaggcctcataatatggtgcatgctattttctggacgaaggctgaggactgattatcaaccaaattaaaattcactggcactgtttacatatcctatcacattatttacattcatagataagaatatccatccatgcacacatgtacacacagagaggccaaaaatgggacccacaagagaacagtttttcacacacatactttggaaatacatgagagttaaaaaaaaaatggtgattccttttcttctgctgtattcattacaggctaggctggtgggaaaatgaagagattttaatgaacaccagtaggataaatgaagaagactatgaagaggaggaatacagaattggaagatgaatgctgaagatgaagaacacagaaatcagattttttttttcctgtgggcagaggaccactcaaagggagccagattctggtgctttttaaaggcagtgtgagcaaaaatacaggagtaaacaaaagcttagtgctcaacatatgggttgtgaaacagtcctttatttatgaggctgggatcctcagacattagctagaaaagtctcctgcagggggaggcagcagggtgtgtgtattttcctggtcttgattctaggcaggagtaggggaaatctcttctgaccctaaagctcaaatgtgctttgagagagcacaaataatacaacctgactttaaaactagaagcgattgtaaagccacgagaaagcagtgaggatcagcagaaaatacatcctggaggatatctgtaaatctgtctagcatccataactgcacttaaagaggacaagatgataccaagagtgtattaaagtaaagcgacaagacaataaaaattaactacaaagtttgggggagtggggaaggcaataatactagcagagataaaatgtcataaaacccagaaactccatgtatgcattttccatgtttgatacacctgaagaaaagtgtgggccctccaagagagagctgaggaaattacccttaatgctgtgctgagatgaaggtgaggctaagtgaaaaagaagctaagaggctggggcacagaatgaaagggcacacggatacattcaaagcccacagaaggtacgaaaggcaaattgggacaggcaattttggaaaacataatgactttgcatctcttagaagcataagacaaaatgctgtatgctttagacattgaagacgaacagtaagaaaggagtagctcacatgtaaatatatttctgtgaaatcttatagctccaaaagtgaagaaagatactttaaatggccatttaaacaaatggcaaatgagacagaactgtgttgagtgctgttttacctgtatagttgagactcacatttggaataactaccaattgggtgtctgtgagaatgacgatggagaaaaatcatttccagagcatcagatccagagagtgcacaaatgagagactctctgaagacttttccaaagtcatctttgtcataaaaatgccatgaagtgtcattaaatcttgttaaaattacctctcagtgaatacatgatattcaggaaacagagcctgtgagctcagtaggtaaaggtgcttgctgtacaagcctggtgtcagacctggatctgattgttggaacccatagtggagggggaaaaaaatcaactctcccaaacacacacacacacacacacacacacacacacacacacacacacacacacacatatatatatatatatatatatatatatatatatatatatatttggtttatcaggattgtgtttctctgtagccctggcagtcctgcaactctctctgtagaccagactggcctcaaacttacaaagatctgcctgcttctgcctcacaagtcctgggattaaaggtttttgccaccactgcctgcttgtatgatatataattaatcccacattaactatataccttcagctaaaataccaaacacagcattgcttccaaagtaaatacatttgacaaaattgttttttcaagaatgtaaagtttgtttgaatattagaaatcaaaaatgttactcattacatttcatttcaatgggaaaatctatattcatttcaatttgctaattaaaagcactataaagctcataatttcataataaaatggtttgaaaacaaggactcaaagacaacttattataatcttataaatgcaatctcaaaagttataattgggaaaaattaactggcagagatcatgctcaataatgaaacttttaaatcattccctttgaaacaacacacatacacacacagaaaggcccattattatatattacctttgatgctggagtcatgtcactaagtaaaaaactaaaatatattatgtgtcctagaactaaataaagcattgttattggatagcttccttacatgcataaaatttaaacatttctaacatactgaaattttaaaaagtgcatatcctctgatagaaggaatttgagatgcattttaagttacatcctctacaaattcagaaggggacatctaggaaaacttttaagatatgcaaatctatgcagcaagataaaactcatttagaaggccctaccagagaactagaaaaaatgatgagaaatagtctatggggccacaggcaattgaaccagtatttatccctagtacatgaactggttttttggagcccattccctatggagggctacctagctcagcctagatacccaggggggggggcgcggggcggggtcagtcctgccggaaatgatgtgtcagattttgatgttttgatgatcacctatgggaggagtcctcaccctctctgaggagtggatcgaggaatgggatggggagatggcggaggagtgggaggagaacagggagaggggactgagattggtatgtaaaataagattttttaatttaaataaaaactaataaaaaaagaaatgatccaatactgccaatatcagccctcttcccagattcatccatgctttcagtacaattccagtaatatcctagaaggatctttcacagaacatcataggacgcttccaaatattctcatgtggaaataaaacgttaatatgatcaaagtaattgttctgtatgttattaatattatagcaaaattttagaactggagtactgcccagtgattttgtaaatacttcactgaaataagcaaatctatatacagactcatatctatggaaactctgtattaatactgatttttaagcagcacaaaaaaggattttatgtaccatttttttaaatgttaccaataaatgcaactatattcaaaatggaaacttctgggtttccagaggatccatttactattaatgcagggatgggaagaaaattagttgttagacccacgatactcaaaatgcatgtagactgtgtaataagaagttctgtacatcaggaaggtaaaatctaaccacccaacagaaaataaagtgaaaaacatttcccagtagaggaaactggaaagccaaatcaaccaatgaaagacctcagtctccatagtaagcaatgaaatgcagatggaaatctcacgaagctatcatttcacacctgccagaacggcaaaactttaaaaggctgacaatcagcctgacatgtgcaaggagatttaaagccccatgaattttcatgtaccactggagggggatataatttgatatcactttggaaaacaagttggtgtcacagagtagaactgaataggagaatattttatggccaaccaaaaccaactgttaagtgtaaaccttagagaaactcttgcatgcgttccaggaaacatggggaggaggtgtctgcagtagagcaaattcttctgagcagctcatacactcgtcagctagatggagaagtaaagtgtgatttgctcacacagtggggttgcatgccagtgtgagcctgcctgactcagttatatgcatcagcacaaatgagtctcaaacacacaaactaaaaaacaagtcaggggacaacgcacattcatacgattacatttatatgaatggagagaagcagacagagttaaacatataatttaagaaagcaaaggaaacaggatgactgttaccaaatgtgcctagggtcacctccaccaagggtgggaaagtgcacagggactatcaaaggcactttcatgtgctatttttattgatgctgaaatggagatgcccacttcactgttattctttaaacagatcctgagattgctcaagccttttcgagtataatgcatctatgacacagttttcattgcacagagttgaatcaaacactatgggacctggaatttgaatcttgctaatttactatgcagataacatgaagatcagcatgacaggagagaaagttaattattcagacaagtggaggatagtaaatactctcacagtttgtagagaaaagaattacattggtgagttgaagaaaacagaataaaattgtgtagaatgagagctcactgttgacgcccaggtcagctgctgtgagtttacaagcacagcagctatgccacgctcagaaatgtccttttgctgcacatctcctaatccacggcccttcttttgcatgtctcctgaaccatgaaggggaggcagctaaaacatagatgtcccatgtagggctaagcactagtggagactttaaaggtgatgactaaatattcagacatttttctaaagtactgaagaccttccaaccctctctggtatcttttaaattagccctctaattgataatgataaattaactatggaaaaccagacatcattcaaagattactgcaggattccagggaagagatggtggtggcaccccctgggatggccatggcaataaaattttttgtttttgtttttttgagacagggtttctttatattgctttggaggttgtcctggaactctctctgtaggccaggctagccgtgaacttacagagatccgtctgcctctacctcctgagtgctgggattaaaggtgtgcaccaccaacgcctgtacttattttatcctctgaaggcaaagtatacacatggtgcacagacaaaaacagccatatacataaaaaataataaaatttaaaaaacaataaggccattgatttccttacagagttgaggatatgggagttagtgattctaagttaattctgtaatatagaatttagaattctacatatacatcatcaatagggaactttattaagattatataggatcatagactccttttcatcagatctgcttctctcaataataggaatttatatccagagaggtgagccattatagtttggacatggtccaagagcaagctgcaggtagcaacacatgaaagacctccacatgtgacctctataatctctctgcagctatcttctgttcagcacaggcctccttcagagaacttgcgtcactaggcaaatgtgctctcacctgcagaataaatctgagaatgttagtggagccctttgccttaaggggagaaaaggaaagaatcaaaaagaatgcagaaagaagaatgaattcagccagtcagaatccttctttcctaggctaaacaagcaactcaataatcagttcctcctatttctaaaaatggtatcagtaagatctttgcccaagaaaaacagcaaaaattttaaaactgcatagctgaatttgatttgctaatattctttttgaactctgaatactttttttttctagccaggcctagagatttctaggctgtactaaatgatggaaactagtggtttttcctacagaatgcaggaacagctgatgcaatgggaagcaagaggtctgattgtgaatgctttctatgtaccaacaagtttaactacaccaaacaagtcaaatgacccaaatgtgccaccctgtggatatgtgtgaaggaatctaagaatactgcatccgtgtttactgcagcactgctcattatttaccaagtcatataagcttagatgcccatcagctgatgaatgtgtacagaaaatgtgatataagtgcataatggaactttattaggccattaaaaaaggacaaaattgtatcatttgtaggaaaatgggtagaactgaagatcatattcaatgacttaactcaaaccaagaaagacatgtttcattatatttgataaggaggggcagcacaaaaaagcccaatgagggtagttatgagcaaagcatatgatgtacttgaatcaaaagtcatgatgaaacctgtaattttgtaaatgactatacactaaaacaaataaaagtactctaggaccccgagttttgactgcgataatgctcatcttaagatgagagaaacccatgtgctttacttaatcacccacaggtgctgcctgtctggcatggtgtgtgttcaccttctggctttaacaaccagatactctccaaagcttagtgatcaggaagcacttcttgtctgaatggcacagctccttcattccagagaatctgactctgggaatgctctaggtaaggttttgctaaggccttgtgctttgttctacagtctacaaaaccacacatttttcttgcagccctttgagctcaagtgctttcactgaggtattaaacccagtggaatgtagtgttcttcatcagaagcacagagcacactggattttatatcttacaaacttaataatacccattcaaaaccatgaatccatataaattgaaagaaaacatttaatccttaaaaagtcaaatgactgattgattcctagatgtataagtttgggcactgttcacatccctagagttggatggataaccccactctcttgttttgtttccctttgttttaaagcctgtgtaccttataatacagcaattatggatacctggcttcataaaccatgacagtgaaaggaactcacccagcctcctgttgactatctggagctagtgcacagttctcagtggaaagaaactgctgtcttctttccctcaaacatttgaaacctttggtgttcctgtatgctccctgcagtgctgaacattgacatggtccagggaccacagctagctctactgaacaaacactcatggaaaaacagaaatacctggaataatgcagtgtcatggttttggctctctagggggagatttgggtaataagtgtccgtgaagctctgaaatcagtatatttaattagattattatagactagaagaattttgctttcaaagtcattcaaatgcaacatgggagaataaatagaggtgaggggtagaaagaagaaaacaaagaatgtgtgctatggttatttcactgtgccttcatactgtcagctgtacaaagagtccttgctatacagtgcagcttaaaagggaactagaggattggaacaaatgaaagttacaaaagaaagcattttgataaaaataccatatggtataagatagttactgtggaagaaattagatgaatggaaatatctatcttaacactaaaaaaagtagggctatggaaatggctcagcaagtaaagcctttgccatgcaagcaacacaactggaggatcacccaaacccccatgaatgccagttgtgcattgctgcctataatcccagttggcaggcggcagagataggggccagacatgcttgaaacagcaagagaccccatctcaaaacataaggcacagagcaaccccggaagacatccaatgccaacttcaagtctccacacaggtgaatatgaatatttacaaatatataccacacacacacacacacacacacacacacacacacacacacacacacacacacaatggagtttaaaggtaaaagaaataaaaagaaagagaaaggaaagatggctcagaaagttacgggagaagaatgaaagaaaaaataagaggcaaaggggaaggaaatggaatgcaagaagggaagaattattaaagttggatacactgtattctatgatgtgacctgtagtactggccacctatcatctgaaatgtgccttctcaattttttaaacatcagacaacaccttctatctggaaagttgttggggttggcaaacatttcatcatatattgttttccattaagtgacaaatattgtataccttcccttaagtttgtttcacatgcatttataattacaagaactgaaaacatatgagaaaacatggctattaaagaacaaactccaaataaggccaagatggttctctgagacaaagcagacacatctgagtgcaaggaatggaatgagtgggaggaagtccaggagcaaagcacactaagtgacaatctccttagcctcttcataatgggactgtatacaaaatggacacagagtttctagctcaaatcatctcttggcgcttgaagcttaaaagacacaaagcctacatggcagcactgtgcctcatttaacagttcttaaaacagccaaagaaccctatactatggaaatattcatcataaaatagctaaacagtgacttcaacactactatacaagcttaactttatttttcctgatagctagaatatcttttggaagttcatgtagctgtgagctggattaaatagctttttcatggaattccatgactaagatatctgcctatgaatggactagtaaatgattgaattggatctttctttctgtttggttgtaaaacagatgcatttcttagtttatagtagatctctcagtgaatgcttctcaagaaaggtcttctgttaaaataaaaagtcacacacttaaccataactttcacatccaagcccttttagctcagcatagttctgtctgagaggcaaacataggctttcactgatgtgtttgtaaggataatattaatttggagtttaaataagattctaaatcaccaactttctcacatttcccagttgaggatttttaaatctttgtaatacaactcattaattgaaaaaacattggccaacatcctcagagtatatcatcaattcctagatagtccctttgatcatagagaggaaataaagaaactaaagatatgagacattttggcaagatatgatttaatatttaggacaatcactgctattgcaattgaccatgttctcaggaccacaatggaccttcaaccaagtcttcagtagaacttttaaactcaactgaatgcaaggaatcacatgatattaaccaatataattgatgtgtataaatacatacccaacaactgatacatgctagattccatgctaccaaattgaatctgttctgctgtatttgtattccatcttcatcctatgaatatgcctccagcatttcctgtgggcataccatttctaattataaaaggcaacacaggaaaacagaatgcatgcccaggggaagctggtctcctgacagcatatgtcatgtattttaaatttaatgttggcctctggttagatgccaaggatcatgtcttcctcatctttgacttctgaacaagaatacagaactctacacaaaagcacccatgggggcgtttgagggcctcaaagggactatgagtgaagtttcactttatagggtgagcctggagattcaatctatttatttatcaggagtggatcatattgcaatgcatgttgattataattattcttaacttccagtagttcctggcttagagtccaaggacgtattcaatggtactcacaatcacatgccgttagactcaaacacacattcactgagttagtacacaagaaaaatcagactaaattcttatgttttgtgttaaaatactatgtcataaaatgtatgcccttaactaattagtaagtttcttaaaccaccccaaatcaccacattaaaaaatgccattgctgcttctctgatgagttttgtatttgccagtagttaaaagaggaaataaacaaacaataattcttatttgattatataccaattgcatcactgtaaagtgtggtcgtgtaggaattacctacttaaaaagagacaaaataaaataccacacatatgtgaatatctactacggggtctggtttcagtagatgtttcataaataatgattccatttatttttctgtggaaacatggatttatcctcaggggattttcttgatactttaaaaaaatctgatcagttattccccttccaattatgtaatgaatgaagtagcttttctatatatgccccctctattctgagaagtgagaagaaagtgccacagctttggggataatggaacaaactctaaatgtctacataaaacaaaaacatgtataatttaatgtcataaatcaactcctacactgtacatttcaaattactttctagatagctgtagttttaaagttctgtatagctggaaaatcacctgcagttattttaatcacagactatcattacaggtactctcagatatgtgcaggctcataaaagtttatcaatatatatatattagcaaatatttatgtagcctcattaccttctgttttataatcatactgaaaatcccatagcctacttgattataaagtgctatttacttagttgatacaaaagtcccactccaccaaaataccctataaaggaccaaaccaatatgccagacctgcagcactcaagcttatttgaattatgaaatactgtgcagtgtagcttcatttctacagttcttcattgtagtgtagctcctgaagttgatgtattcactggtttagaagaaacacagaatccagcagagaaagagaaaatcatatttgactttgaattccaaaatggccttgatacggccttcatagacaacacccaaagagacaacagcctttattagtgggagttgggctttgttgagagggtagatgtagaaggcccacaaagataaggcaggaaaactcagcatagacaagactgatatcaagaatagattataaagtacaatatttcaagctggaaaaggtaatgagggagggaaggaaaagaagggaaaagaaacaagaagggaacagggatgtttatctaagccttttgtaatctatgttataaactgaagaaattagaatgcaaaagtcaagaaataataaagaaacatggtttctgtgtcatgagaaatctgggataaggcaaaaagatcagaaagaaattgtacagactccagcttgattgacaagaggctgaaagacagatgctcttccccagatcacacatggaactctgagaagagagggaaggtggctagaggaaagtggaaacacaggacagcatacatcccaggtcattcatttttgctcaccatgctcagggctaagtcatctagaatcctgctacagcatctcaaggagccctgaggacatcctataccctattctacctccttagtgtgtataagtgttccttacttcctccaagaaaattactctagagacaattacttctttaaaaaaaggtcagattgttgaaagagtataaagaacttctgggaaagatgagtttattttcccttaccaacagctgaagtgggagcacatgacaaagttgagtttaataatagaaaataaggttattttctgaatatgtatcacctgttaagtggttctggtgtttttccagatgcaggctcatcagccatggtagaattgaaaagtggagatgctcccccataaggatgtcaaaactgatacatagagataaagaggcagggtcattctcaccgcagctggctcagtcctgtgtgtttccagatgactcactgcttttaaatttttagctcatcagtaacaagagatgagcttttaagaggcagatggggggaaagaaggggccctgtggcatagcatggcaaaaactgaaacctaattacttagcttgttgcactaccttattaaaatacaaagatgcagaaaacacaattctattatcagaacctcaagagaaaaggtagattgtgttacattatctaatgggtttttaacggaaatactaaagaaaagtaaactatgttttatgtgtttttttcacataaatgcaatgttttttcaaaaacctgggggtgggtgaggcttgcgggactcttgagtgcatgatgtgtaagcagaaggacctgagttccagtccctagcacctaggcatgacagcgcatatctgtaactccagtgctgggggaggagacatgggcagaactctgaaccttctaaggaagcctgcatgagcaaattagtgagctcaggttcactgagagaccctggctcaaaagaaaaataagatggaagtgacaggaggacatctgacatcatcctctctacccttcacaggcacatatgtgtgtgtgtgcacatgcaactgcacagacaaatgcaggaacacattaacatgcaaaaatgaagcctagtgtaaccactaggacacacaagtgtgaggaaccacgttcaaatccccagatgacacatacatacagctggatgtgtgtctataagcccagtgttcctatgatggatgagtaggaggcaaaagcaagagaattcccaaagctcataggccagctagccttgaacacacaacagtgatcaaccaaaaagagactgtgtctcaaggtggagggaaagaacaacacttaagatcatcttctaatctgtatgcctgcaatgtgctgtgtgttcagatttacacacaagactgtacacacatgcaaacatatacacaatacacttagcactgaccatgcagctatacacagttacacatacagtcacattacttctgtattaaactaacatattaaggtaagagcttgacagaaccagttttgactttggtttattttccacacagagattctatcttccaaactagtttcagctttgaaaggctacaggaacatactgtgggtaacagtctcattcagtgccaggcagagttcccacagtggttttacatagtgggatgaaaaggctgtattgtaaggaacagtgtatgatctgaataggtaccttctaacagagcattgacctcacagtgacaagatgacaggggtttaccaacttcaaagtgttccaattctacatttatggtgaagattatcctctaagttccaattcaaattaaacccaaatgaactcttcccaagagtccatatctcactcagtgccttatagtcatatattgatatataaatataaaataatattactaacaactaggtcaggaattacatctacagggagagtttttttctaaaggaaggatctggtaggcaataccatgcacttaaatacttcagaacccaagtcatagcctgtggcatcatgcagtgaaagagccaagctacagctacagtttggataaagggttttggtgactatctcacttatgctcagaatgtcatcttcctaccttgtagtccagggcctcttagacaccctcataaactctgagaatagttcccacctaccatgcaaagtgctgcaaaaggaagacatggccttccttgctgcaactgttctttgtatgctgctcagaggcaagggttattctctcagtttaggaaaatgaggctgggaatgacccagtgaccatctttagttctagctagtcatgagaattaacctgtaagtgtgactataaaccctgttctgatgttataccagctgaatgcattttttattgtaactacatggacatttgtttccatctaaaattattgtccacatctgcttttaaattttaatgatagtcaatatgcctcaggaacagaggaagaccaatattcaaggtttaaaaatggtccttagacatcctagtagaaattacctttctaggagtgacatgccttggaaaatgactgattttatcataccagaaggataacatagaaagccatatgtgtatatttgatttgagagtcctgatgtcagctgggtggtggtggctcatgcctttcatcccagcacttgagaggcaaaggcaggtggatctctgagtttgaggtcagcttggtctacagagtgagatccaggatagtaagggcaacacaacacagagtaacttggtctcaaaaaaacagagagagagagagagagagagagagagagagagagagagagagagagaacaacaaaagatgccactgatggtgtttattctataatcaaaggggctggcaaataaattttcatgaaaatagttagatggacctctaagatgattgatgtagctaaaaatagcttatctgatcaattttgagacaaaaattctaaatttgtttagacaaaattcaattgtcagataattaaatgagccccaaggtaacttgaagcatgatttcgaaaataatcttagtctataagaaaaggttgacagtggatttcaggatgaggtattagcttgttaactaagttgggcttaatatggtactaacagcagaggttagaaaagaggtggcttggtattccacatcccactaagtcctctaggtggcctcttgcaaatttgagaaccaatgatttcatgggggtgggagtgaggtgtaaaacattacagtgccaggctccatgctggaaacttcaggtataatgaatgaatcagggtaacatcagctcccccaccccaccccaagaagtggcctaggagattcttgtctcagacaggattgggaccaactggcctgttcttcgaacaatgttctaaggagtacatacacacacacacacacacacacacacacacacacacacacacacacacactatcctccctggaaaacagataaacacataataacaatctggctgaactgaacacactaacacttttctgatggggaatgtactgtgtatgtttatcttattgattgttaaataaagttctgtttggccaatggtagcaagttagacaggactaggagtcaaagaggattctgggaaatgtagtagataagtggtgatccaggcagggagtaacatagcaaggagactcatatctaagcgaggaaacaggaagtgtcccttttccccttcctcctccagcggtgccatgtgagccactgacaagagagggtgctaacgaaaggcatcctctataagataagtcttataaaatatatagctttatgataattgagactgagctaacagatgagactcctagtcattggcaaagcagcattgtacttaatacaagtctttctgagtattaatttgggccctcactcaggcgggcggctggcataaagcacaacgtggcactggggctcggcggcttttggcagaaagattaattgtaacacttttcctcttcaagtaactctgacctccagagagttcaattactgggtccattccatcctgacaaatggagctgcactatcttacatcataacaaggaagtcataaacagcttccaggatgtgcttcacagatccaactgtcttagaagccatcaccggatgcacaaagacctaagaaaaagacagatgctctgtttttcaacagggcaatccaaattcatgcaagggccttgtggctcacaggactccaccatccctcccggcatgtcaggcaattaacaagcgtagactcaccacccattgcttgtcaccaaacaatacgtttatatattataatattcatgtatgaaaatcacatggttcctaaaattgtcagcttataaaatccaattgtcgccgggtggtggtggcgcacacctttaatcccagcactcgggaggcagaggcaagcagatctctgtgagttcgagaccagcctggtctacaagagctagttccaggacagcctccaaagccacagagaaaccctgtctcgaaaaacaaaacaaaacaaacaaacaaaaaaaatccaattgtcagcatcaacctatgggataatagtgcatttctgttacccacagggagtaagatagctctagggacccagggcacacctgaaagcagggcaccacatcacatctctaatgtcttttccaacctaactaatcacttatgcaaaagcagttaccatttgtgcagtttgaaatgacagcaaaattagcacacgaaaaggactctatccaaccctagtaagacaaacatggctctggcaggcttgtccttctccccaattccctctgccttgcaaaaaaaaaaaatagattacattcctaaagttggccattaagatctagattagaagaaaggctatgtgataggtagggttttagttggaggtggtggtggtaggggaggaagggagagagaagggaactgggattgtcatgtaaatcaatcttgtttcttattcaaataaaaaaatgataaaaaaaatctattcccttctttggccactttctcctcctgaagctgactaccaaggtctagctatcaaacggttgacatccagcactcaaaagtcctcttttgactaccctgattaacatgcccaactaaaattaaatacctcatcctaacatagggtttctgcttttacctttataacccttcattgtcctaggggacacatctcctctctgtctagaggcagttccttgttccctctgggacaagcatttctactcccttccagtgttcctctttcccctcttcctctaccttctcttcttactctcttattccctaaactttgttgctctggagcaaataaatctttgtgcagagaacctgatctcgggggtcttgagctaatactgatccttctgcatgtatgtgtcctttcttccccataatgttatggctagaaggttattcttaccgtagatcttaccaacctctgcatttgctcttcttttcatcagttgttaagtggagaatacccacctgttttctcaaaggatgcatattttggctttgtttttcttttcttttttccttctttccttccttctgtcctttctattttttgcaaccaaattgtcatcattaccatccttatatttcagggagattattgagtaaaataagggttacttgagaacaagcatttcatcactgttatggttgatctaataatcatgtgtcaatgccatcagtggctgatggcagctcgcatagacaagtatggataccgtggatggcgaggatgaaatgtatcccacggaggatggaataagatggggaaagatgtcatgattctatttaggatggcatgcagtatgagatatacagaattctggaatttttccatttcgcatgtcctgaccacagtggatcatgagcatgctattaagaaaggctttgtttcatccagcatttgtttctcattctcctgcaagaagcatactgacaaggatatgtgaagagcatcatttcctgctgactcagaaacaggatacagaaccaggtcagtggaaaccttagaattaaacctcaaggcctggagatctatgcatgtggattacagcagcaacacccaggagctcatcaaaaatgaagattcccagacccgcccccatcttctgctctggagccctggagataggcttggcaaatctcccagtccccttcccccatgcctgtggggattgagaaactcatacatagcctagtcatataggagatttttttccccaccagattctccccaagacccaactagaaggaaagaacacataatatatcaagtcagcattttggagtgaggtactaataagacccagtcacgatttccacatcagaaaagccactggagttcatcaagatgtaggtttatccaaggccatggctcaactactgctctgattttagatatcagtgtccctctaatcgacaactgctgacctgtggaccttgacttgtccttagtaagggacaatttgatatcaccattcatgatcaatctcttttgccagcacttaactctaacggggtcttatttttgacactaggtaattgttataactcagttgtgttgtttatctcacatacaaatgactgaaaatttctcaaagtatacaagcaaggcaactgatcatggggcctcaataaatacatcttatgcaaaagaatctatgcttctacttcaccaaccacttttaacctacaagcagaaaatgtccacaagtatgttgactggcattgttaaattacagcaaaattttttaaaattttaatcaagtctgtttttacacacaaatgtgaagtttggctttcatcatctgaaataccagatcatgggacaatgatggtgtttcccaggtgaggactacacagcagtgctgaagatcatggccacctatgtaacctacagctcttgtttttcttcattatcatactagcaattgtgttgtcacacagtaaactggaaatcaaggaatctctcttatgcataagtttctatcaaaatcaggtggataaagactcatacaggtttgaatttcaagaaagagatgaaaatctttgtttattatgggagttcaaactgttcctgaggcagaatggaaaggaagcaaagaggagacatgggaagtaagagaagccacttgttgaaatctaaagggacatcagaaattttaaccaagtagatagtgtttgctgccctacagacatccaaaatggaattcgaaatcaaccagctgtttaagcagggccaggatacttgtaatcctaaatttgagagtatgagcgctcctttgtccttcattaataagcccagggatagcagcccataaaaacatcgtacagtgtaatttacagaaagaaattcctcaagatgagacaagggaatcagctcctgttttatttaatttttaaaccctccctaaattctatgctttgattcatatttaaaccctgctgtgtaaaagacacccttggaaatatgttacttaagtagcaccagaatcactaaacagccattgtagacaccaaggtacatttctcttgagaaaccagtgctcatgccttagatacatactcagtgttccctgaagatttctctttcccttcctctccttcttttgtgtgtgtgtgtgtgtgtgtgtgtgtgtgtgtgtgttgcctgctccactcaatactcatgcttaagcatatactcttgtttatcataataaacttactagttttatttcacccttccttgctctgacattcttttctgcaacagtcaaggatccagctttgtttgagtggcgttcccccacctctcaggctgtgggcagcagtgatgggctgtatcttccagcctacatggtcagcatgtaagccagacatctgttctgaaatcgaataactgaaggctacaaaaacatcctgactagcttcacccatggccatctccgccaggcccccacagacacttgtacacaccaccacagcttttgaaattaactatgacctcagagtctattaagacacatgttctcaaaattaactgcacatcagtgctactaggagaaatgcaatcatattattgcttgggtccccaacctggagatcttattttaaccaggctgtgccatggcctgggattgcttttagcatccaaaattgatgcttatgtataggcaaggctgtgggtaatttacctgaagaagatggaagagggagttctgcagctttagaagttttttgttttattttgtttttagggggttagcattgtttctccctctctcaatctgtttctttaaaaaatcagctgttatggctttagctttcgattctagttgcaaggagagtgatgaaagtggagtcctacacacatattccattctccactctgcaattcaagttggcagtcagatccttctatggtctgcctgtgaagctcacaggcatgcatattgctgtatttgtgtggtatctcaagcagaagtgcaaagggtacatgactttgctacttagtaactattagcacagcttatgtggttaattacaggttagcaaatggggacaaagcatctaagttactgagatcctacaaaatactgaagctaaatgctggactgagcaggaaatccctaaagattcagtaatttttttttaattacaaccaaaccagcccttcttacacagagctgtaatggctggggataaagggcttgactcctctacaaagcacccattgacggccagggtctccagagaaacactgcctggagtgagggaagacactcttgcaatcttttttcattctcatcctactagctcccatttttagtaaattctagatgcaaacaatacaaaaagttttcctccactagtgagtttaatttggaggggtttttaatttaaattagaaacaagcttcttttacatgtcaatctcagttccctgtacctcccctgctcccctgccccccactgaccactatctcaacccctttctgctccccagagagggtgaggccttctttgggggatcttcaaagtctgccatcatttggagcagggcctagaccctccacagtgtgtctaggctgcaagagtatccctctatgaggagagggctcccaaagttcatttgtgtactaggggtaaatactatccactaccggtggccccatagattgtccagacctccaaactgacttcttccttcagggtgtctggaatagtcctatgctggtttctcagctatcagtctggggtccatgagcaaccccttgttcaggttagctgtttctgtgggtttctctagcctggtcttgacccctttgctcatcattccttcctctctgcaactgagttccagagttcagctcagtgtttagctgtgagtgtctgcttctgcttccatcagccactggatgaaggtgctaggatggcatataaggtggtcatcaatctcattatcgaagaggggtttgtaaggtagcctctcgactattgcttagattgttagttggggtcgaacatgtagatcatgtaggacatttccctagtgccagaattctctttaaaactataatggactacttcctgaacataacaccagtagcacagaaagatggacaattaataaatgggacctcctgaaactgagaagcttctgtaaggcaaagaacacagcaagacaaaacggcagcccacaaactaggaaaagatattcagcagccccacatctgacagagggctgatttccaaaatataaaaagaactcaagaagctagtctccaaaacaccaactaatccaattaaaaagttgggtacagaactaaatagagaattctcaatagaggaatctaaaatggcagaaagacacataagaaagtgctcaacatccttagctatcaaggaaatgcaaatcaaaacaactctaagataccatcttccacctgtgagaatggctaaactaaaaaacaatgacagtttatgctggagaagatgtggagaaagaggaacactcttccactactactggtgggagtgcctactggtacagccactttggaaatcagtatggcggttccccaggaaaatgggaatcagtctaccacaagatccagcaattccactcttaggcatatacccaaaagttacacattcatacaacaaggacatctgcgcaactgtgttcatagtagcattatttataatagccagaaactggaagcaacctagatgcccctcaactgaagaatggatggagaaaatgtggtacatttacacaatggagtactactcagcaggaaacaacaatggaatcttgaaattcacaggcaaatgaatgggactagaagaaaccatcctgagtaatgtaacccagtcacaaaaagacaaaaatggtatgtactcactcatatatgaattttagatctagagcaaagaagtagcagcttacaatccacactgccagagaagctaggaaacaaagaggaccctaagagagacaaacatggtcccctggagaaggggaaagggacaagatctcctaagttaatggggatcatgggggggggaggggagaacgagaaggggaggggagaggaaggggaggagggagcaagaagatctagtcaggggaggaatggaggagagcaagaaaagggacaccatcatttgagggttttttttaagtcaaataaattatgaaaacagattatgaacaactaccctattctaatattcacagtttaatgtctcttttcaaataaaaatttcaaaaatccttgaaatacctgtctcttattactccttgaacatcactgttactgtctataaatgctcttttgacattactatgaaacataatttcacgtgttattcactgattagattcctcccaattctttgttataataaatgttgtactgagcattttatcattgagactatgtcaggggacataaaagatacagcaggtgttaacgtgtgttaactcttaacagcctgcctgttccctgactcaggctatgcacatgattacctcactttcatctcagagcaagttcaaactagactaaaggctttttttacagcttgcacaaggtcagagtcacagatgtttaccaaggttactaagaaaagcatactaatccttcccttgccagtctactaataatagacctgtcttaaagttgtcattgggcatggtatcctcccctggctggtcattgttttgctcctatggcttggacccatgtgttgtcatggtaaacagttcagctcctattgcttcctctaggaatacatttttgaccaatgagagaaactttatcacttcaaggctcctgaagaagagattttagaatagaaaaagcagctagaagaagcatggagaagttagacctagggcaggattattagagtagaaacagaacagtaaagagcacaggaaataaagagcacgaccctcagattgtgtgtcaagctactatagaaatcttttacccccctccttcgctcctgagaaacatttcacctttgggaccctggataggggctgaagcaggtctcttagcccttacaagactaattattttacttctatttaggttacttattgctatgcagtatagaatggagttacagagtccagttctgcagacattctccagggttagctttgtacaggtcaacatgcagggagggcctcaggctactggttctggagctactggagagctcattttctctcccttcctcttcctttccctgtatttcctaacataataggtgcctccatcttttcctatttgggtcttgacttactgaccctacaatcaaacttctttatctttttctgattcttttggacattttctatttcagattttttaaatctaaagactgatgaacacttgtgttttatttttgttttactatgtactgtaaattctgaaagttattgtagcaagctatatataatatgtatctaaattaatttgtccccagattgttaactgtgaactattttattacccctccttgtcctctctctttttaaagggaaaaaactgtgtaccataactggatttattccatggctatctattgtttacaaagcacatctcttaggtgaaagttttattctgaaaatctattttgaacatgtagacttacttataagctttaatttgttcaaactagaggcattcttgtttattcttacttgctttatattatttcaatgaaattttataaaaatcaggcactacctttgctgatctgggggatatgtcatcggtatttaccactctgataaattagtatttctaatttctatctcactttccctaataagtcatttattttacttgttttcaaagaattttcttgtaattattgactttgctatagctttctttctctctctctctctctctctctctctctctctctctctctctctgtgtgtgtgtgtgtgtgtgtgtgtgtgtgtgtgtgtaagggagcctcaggacttgtatgtgtcaaacttataccctaccactgaactataactgtattattataactgtggtcaaagagctttttgtaaagcagttttatctgattacaatgagttgtcctgtttattctaatgctgctattttgagagtcaaaaatacattcctttcaccaagtctccctacccccccaaattaaaaatatttctgaactgatcagaaataacatattttacattttatagaaatgaaaatattttagcttggcatagttcaataatggttttgaatgcatgtctgtcatgttaaggacgaacacatattttgagtgacttaataatcatggtaatgtttattataagtctttcctccttctatacatgtaatgatatcagtctcctgcagttttgtctgagacattgtattctaatagttgattatttaactttcatgtaagttccaatgtattttaacagcctggacctcccaaaggcaagtgatatatggcctatataaaactattaatgatcatcaagaaattcttttcaattaaaaaataactatggtgatgtggagatagctcagttcactaaagtagtcaccaggcaaacatggggacttgagttcaattttcagcatccacataaaatgtctgtcctgtgtggtgatagatgcttataatcccattgccacaaagagagacaggaggatctctggagtcaaggatcaaaggtcatctagcttagcacagtgttgaagatcaagttccagtgaaattttctctcaaaaaataaggtagatgactcctaagaattgacatctgagtttgacatctggcctccacattgctcacacacagacaaatgcatccacacacatgcaatcacacatacacactctcactcctttcccacagagatattttaaaacaacaacactgggtagagcccgacttatttttatacattgtcattgcctaagtataagggttatttgaacatggatctaggagaatggaggagaaggctagtaggggtgtttatacatctaatttaatcatcagtttctgactactacatttatctggtcttgttagtaattccagcagaatcttgttgtcataactatttaatgatctgttatcacttcattatagagtctgtcctatgggaggtatttaacacccttaaattaaaggaactaatcattttctttcctccgtaccagtggaggttaggttggtcttgttccgacaccaaataagagtaattttacacctcagcaaacaaagtaatggcgggggttggaataagctgcacttctgtgctctgtaattgaagctcagagttggctgtgaaatcaaggcagaaagcaaagtaaacgctcaaacataaaagccgtcggtgctcctgcttgaggaggttgatgatcaggcttcagagcatgtgaccgcgaagccaggtccaatgcactgagatctgtactggaaataaatcatgtgcctccctatgtcactctccaaggacatttgagaacatatccttccaacatcaagggacatcatgacatacgagtgattgagtttttaataggttgtcagagtttcccattggacagaacctgtttgtcaccttaatatttgagttgtcactgtatgttccaaaggcactttagagtcacctgaagaatcagaatcaggtcacatgtgatatatacacctaccgccaattaaaatttacatttaatcttataatatgtgttgaataagtgtagattcttagatgttttacccttcacaataaaaaaaggaaagtaatcatgtcccatttccttttagctacaaaatgtgctgaattcatggtaaatgttccattgcttcatcggcattaacacaaataaatttaatgtctcatacaagcatgtctcatacatttagaagagataccaattcattactgcaaggaaaatggacaggtgcaaattttacaatagaaacaaatgtgggggttaaaaatcattgttagcgtttccaatctttgtgggggaaatgatagcagggaggagaggccttagatacaaggtaactagaggaaacacagctgtgtcttggtaactgtgcctcctgctggtcagatgttggcctctatgtccttggtatcctcttaattgctgttgttttccattgttgcaaaaatgaaggactaggggcatttttccacacaagtgctgaccaagggtctctattctcaaagactggaggccattatagatattatttgcagtgtattttgacaagactcccttttgtgggaaagaaacaccctaaaagggagatcaggttcaccatgatttgggatagaaaaggggccatgaaaccatgattacatcacatgcttcataaatattcctttttttttttaatttgacaacccagaacctactaggttgctccccactttgggacagatcatggccatctctcttcagagtgtttgctttgccttgctgagtaaacttctattcaaaccatctatgtctatttcaactgaattatttctttttagaagacaagaaccaagagaaccctctacatgccagcactgccaccgatggagattcaaggtgaaatatgttcagttatttagtagacatatacaaaagactcaagtcactattatagtcaccccaaaataaagtagaacattggcaagatctcccacaatttgaattcctaatgccggttccttagctattttcttgtacttacaattttggtgtaattctgaaataatgggctcatgaacaatacactgcacttactaaacattttggaggaacacataacttgaataccaagttcattgtttccattttctcagaattgcagcctgcctgcagccaatgtgctgacatgttaatttgtgactgaaaggcacacacattcattttcatcaaaataccatgaaaaaaaatcttggtagagttgacaaagatgacagaagggagaaaagactccctcagcatggtatctgcttttgactttctggtggtgatttgtggactaaaagttgaaaaaaaaatttacatcatcattcataccaggagcaataacttcataacagaaatcaaactgttaagaatttgttcttttataacagaaacaggcacaacatattaggagagatgcaaaaatactaaagtattaagatttgtaagccatccaaataaaatgatatataattacaaggttggccttaggtacatacagcctgaatgtttaacacattctgaacttgagtgaggcaagaatcaatgcaaaatgttggaattcaatataaaatgtcatgtaattacatttagatgtttctaagatgtttcttttagcagaaacaaaacataagaaatcacaaaagtagtcttaagtctaccaaaatattggaagctaaaactaacatttcattgcattttttattttttattttttaagataatttatttatttttatattatgtgtattggtgtttgacctgcatctgtatgtctgtgttagtgtgttggatcctctagatctggagttacagacagttacagagtgggagttgggaattgagctcaggtcctctggaagagtagccagtgcttttattttttaatttattttctttttaaaattttatttatttatttatttatttatttatttatttatttggtttttcgagacagagtttctctgtgtagctttggagcctacgcaggcactggctctggaggcctggctggcctagaactcatagagatccgcctgcctctgcctccagagtgtatttattcttttaaatttcattttacaacccagccacagttctccctcccacccctccacctatccctcgagctcacccccagcccactccttctcatgggtaagggctccaatgaggagtcaaaaaagtctggcacaataagttggggcaggaccaagaccctctcccatgcattaaggctgagtataatatctcaccacagggaatgggcaacaagtgctcttaatcattgagccatccccagcccctcactgcactttttattaataatgctttacatcaatcatcccagagaaaggcacagaagttttgaggaagatatttagactactcatctgattattataataggaaattccctggagggtcaaagggcaaaatatacttgaaagaagtaccagctaaaattcaattcccattgttctaatttcatggcctccaggatcattttctatttgtgtaatctggtcaccagggtacatctatacactggaagggactgtcttacatagttagctgacaaagtcctacatgaagtattatactgtaagttaaagagtgagcaagatttacaaagttatgtctgaaatttaaaaaaaaaagttatgtctggaaatctggctactgtgaatcaatctttgaggatatgtcacctccagctgaccacagattctctcatgtttcaggatacaaaattctcaaaagtcttatcaaaataaacccacaaaatcaaattaggcttaaactgaaatagctttttcttttctttttttctttttcttaacagactacactaagacaaaaagatgaaagaaatgtaataatatctaatgtgacatttatccaccaatttcttattctgtttcttaactgaattttctttttaacagcactgcaaaagtattagggagtctactatactacaataatctattccaagaatatttatttgtctctctccatcacaaaattatgagaggatgattttgaagaggacatacaacactacaatctaatattgccttaagaatttattgaatactatcttcatagaattatgtgatttaaagaccttgtacatgtggtcaataagaaggttcaatggataagagcgattgttgtcttatctgacaacccaaggttgagccctgagatctgtatggtaaaaggagagaaacagctcctgtaagttgtccactgacctctataagcatgccagacaggttacacacaatatataaatgaataagtgtaatcaaagcaaacaaaaatgcttatacacaaagagactacactaaaacaaaattgttactgagaaaatattttttgtaatctttcttattttacattctctaaaacagcagtattgaatttgacattagaaaaacatgttctacaaaaacttcaattatatttcaaaaaattttagtgaaacacaaatagggcgaattctagttcccactagtttaatagagtgaatcacttcccatcatcgtgatattttcaaaagaatagattatttgatcagtgtaataatagttataccagaaatagacatctataaatatagccgactgatctttgacaaagaagcacagacaatgcgatggagaaaacagactctaacaatattcaggggaagggatatgggaggataggagggagagggaactgggattgatatgtaaaataagaccatttctaaataaaaaataataataaaagaaaaaacaatgttggaatagcagacagccacataccaagcaaaaccaaagactagggcacagagaagagagaatctagagacagacatacactgttcccaaaggtgaactcaatatgccatagtactaaatgtaaaaacaaaactaaaacttctagaaaatacactttgcagaaactttatacctgcccagatatgaattttcagacagaatactaagcatactaccatgaaagaaataattggtcagctggcattcattaaaactaaaacattctatgaagcacacagtcaagaaaacgagaagataggatacagacttgaataaatgccatcttagagccttcatcccgtagctgatggaagcagaagcagagattcacagccaggcactgagtcaaactcctggaacccagtttcagagagcaaagagtgacaaacaaaggggtcaagaccaccttgggaaaacccacagaaacacctgacccaagcaaatggaaactcatgaaccccagtctatacctggggaaccaacataggactaaaccaggccccctgaatgtgggtgtcagttaggagcactgggcagtctatggggcctctggcagtggaaccaggatgtatagctagtgcatgaatggacttcgggagccatttcccatggagagatactctcttagccaagattcacaagggagggtctaggccctgccccaaatgacttgacagatttttaatgatccctcattgaaggcctcaccctccctgggaagtggataggggatgagatggggggatcgtttggggggggtgtatgggaagatgagagggagagggaactgggattgatatgtaaaataagattgtttctaatttaaataaaatttatgtaaaaatatacatagaccaaacgccaatacaaaatagactcaactggtagaaaacaataccattgaaaaacaatcaaaatacatgaatgatcaactgtccagagaagatgcaccaatgggaaatgcacaaacaagttgctctacatcacatgccaggagcagcacataatgagaatgaaatgtccttcatttccattgcaatggcacaagctcccaacatgacaccacccagtcctgacaagaatatgaaataggaggacccctcatttgtgggggacacaaaatgcacagccacctcagaatatagactggcatcccacccctacttccttcctctttgctttccattaccatgtaggtaattactctacctctgcatctggtagttgcttccagaaccatctacaactgtgcttcttagttgtgatggctcacttgagcaccgtcttgactgggttgggaaatacctagcagatgagcaaagcaagcttcacatgtgttggtgatgagtttcccagaggctgttaactcataggcattctgatataatcaacagtttattcagtggatggattcttcaaagtttgaggtgactactgggatgtggtggaaactctaggtggttctaatgggaggaactactttatttggcggagtgtcttggatgaaactcatcctggcccctccctatttttgttccactttctgattgcttggagttggagtgcattgctccatcacacctcccagcgttggaatctgggagctaaaaccaatctttcctccctgaagttgctcttgtacttgtcactgtggagaaaagttgactagcacattggcatgtacccaagtcacctgaaaagctgttttcacacaaaaccctgcacagaagtttacagtaactttattcaagtggctggaatttgtgctcttgccctcttcaaatcacataaatctttcatgtctttaaattgccaacttattagaagcatgcagtgtgctgtgctcttctatgggtgggctggtaacaacagtgctgtgctcagatagatagtggctgtcgttcagtgctgataagtgacttatcaaaacacaaaatgacacaaaggatagtaagcctagagtgaaaaagaataaccagtctgaagagtctgcacactgtgtggttgcaattttaccccactctgagaagttaaacctatggagataacacattttatctcagccagaatgccaggaagtgaagcaaacaaacaaaacactatggagatagtgaaaagaacaatgactgctaagaatctgtggaaggatagatcgtattcttatttcaaaactcatagcatgctcagtcctcatagcagatcctcttgtaaactataggtagattgtgtgtgatgatgatgtgtcaatcaatatgggctcgtcagttgttaccagtgcaaacctctggaagagaatgctaacatttagaggagctgtgctttggagatgtgcatggagaatgcaaaatctctgcatttgcaggtaataatgctgtaaacctaaatattctctgaaaaaatctattaaaaatgagagcagaaaggttaagtcaggtgtagattagaagaaaggatatgtgataggtagggttttagctgggggtggggtggtaggggaggaggggagagagaagggaactgggattgtcatgtaattcaatcttgtttctaattcaaataaaaaatgataaaaatactgcctagaaaataaaaactaaaataaaatatctatagctataaaaaatcaaaatactccaaacttaaatgttagatttccaggaatgtacacaacctaaaccactgctcaccgatgtgaatactcaaacctcatgcattcagttttaacaatggctggtatttcacaaatgatttctagttttggatgacctattttcaggcaaaattaaccttactttagaggaaattgttaaaggacagcaaatgtactaagatgcattcatatttcctataagatgcttcattattgtgtattgtaggtcacaagtaaaccatgccgtattttaatgtgcaaagcattgtctttcatgacccctggtactcgtttatccatcttgattcatctcaaagagtttttgtttcttaacttttcaaatactttccctcttgccaagataactctcgaggctgtggtcaataaccaagttcttgaagtttcaatctcagaagggaacaaaagtcatctaactttcagcagtgagggcctctggccaaggagtgtatgttttctcttgttcccttgaaagcacttgtaagtactgcttccctacatctctttgtttttctaattgtaaaacaaccataagatgatgcaaaggctaactcagtggtgagaaagaactctcccatcaaacacttaatatttaagctgtgtttagtttcttcctgcttttcagtaattacaaacatgccatgttcctaactttcaatcctgtttttaagcactattatgatatttattcatattataattataaattatttgtaatcattataaatattcataagcaccctattgatggctgaggatgtcacatcagaagttgggtacttgaaccatttccccactgccaggagtgtagggagtttctacagtgatgttttaaagcaagttttttttttttttttcaaagtaatgctagcctgcatttgaagttcttctgacagggaattttcaaaatcattctctctttgacataaagataactcgtgtgtaactgtaacaaatacactatgaataccattgtcatacacctgtttatataataaaaatcacataactctgcatttaccattttatcaaatacattttctccagtattctggcatcttcattcatccccaaataggaaccttttccggcttcacaaccctgtgtgaataactccttctgtcctctcatttcatccctgatccatattatttaataaggacaactatatttcagctcacatcaaccctccaaatgcttgacaagtctaaggaatcaaagggaagctgcatacaggttggcatggcaggcagagtttgaacccaagtacaactaactacactgcccccaccacatgccacgtgccctgtgttcccagaggagattctaattcatgagtgaaatcaacagactggccaccctaatgaccatgcctctgggagagcaataagatttggtagccgaaggcatttctgatttgaggatctgagctgctttgtggtgccctagaaacatgtcaaggttttaagagactctgcttccttgatcttcccaactgacagttcaatttgagaagaaacagaacagcagaaaaggcaaaggcctcaaggttcaggtagtcagcatgagctgatggggaaaacaaagctgtggagtcaagcctctaagagttttgtctgtgccaccccaccatgcaactggcatggatgaactggagagagaagccactcccttccctgagtgtaaggagccgttacaagctagtgcgcatgcgcactaggtaactttgtaactttccagcccttggtctccgcccctcccgtgacgtcatatggtccaatgagcttcagccagtcagggggtgacagtccgaggcggcggttaccagcctatataagggatgggtttttgggagttcggagtctccgccctgtaagcttatgctctctctctcaagacgcattaaagctttactgcagaaggatcctgaggagtgtgccgagtcatttttgctggcgagacggtagcgcgggacacctgagctcacatgccaccccttccttcaccctttccttgtagttgacattcaaagaagaacacactaaaccgcactggagtaacggtgcaagtcaagacagtattagttcatactcacgtgtgaattaacttagagaagtatgaacaatcacctcccccgtacagacagctcagatattcactgtatgtaaaaccaagtgttacttgtgttactttatagacatccatagtggagaaactctcacagtctgtgcacattaaggtttaaggatttcctgtgacatttgcagttgtctctctggtctggacctcagctctgtgagctgtgactgatttgacagcttgagctgtaggtttcaaacagtaattaattttaagaccatggcctccagctatacttgtagcttgctgttaaattaaaatgactattactcttagacagctcatttatttattaaaaacaattttgctaaaaaaattaaaagaactgtgtaggatattaaagacatttaattagaacaaaggagataagaccaggtttgtttttttttttttttttgagatttctaaagcataatctgcctttttctcatcactttatgttttctgctaactgaactttactgttctagtttgcaaactaaatataaacctcgccctccatttgatgtacatatatcatatctttatttttccaaagaaaaaacatttcctcccaaaggcaatctttacagtaaatatgctgtttattattattttctcatgtatcctggatggactttaggcaggaagctctgggtttacaaaccatcaacttatttgtttgttgtcatgattttcaactattgcattccaatgctttgaaatgtagagcacctaatgacagggatccatctgccaccctgactgagaaaccgatgccaggcaggcccatgagagaactggttgatttgacgactgagtgaacagaaagaattgctctgtgtgcaaggtggggatgtgggtaacttgagagtgctgccttcacacctgctcttccgtctgctggtgatttgcttccttttctagtggaccctccctgaaaatcacactagtagacagctccctaaagcataccccttcagctctttctgtgcccttatctcgtttcctgaaggctctaatatcttacttatatggcacttagaacaatggcttcccaagatgcccagagagtgatctttgggccttgtgaatgcatgtccttaccatgcatggagatggctcagtatgactaagacgctgagaatatcctggctttgcagttgtgcccaacctcatcacatggatttataaaagattataaaagaattctggcttgaaggcagtggttctcaacctgtgtgtcatgacccctttgagagtcaaatgacctttacacaggggtcacctgagagcataggaaacatcaaatatttacattatgacccataacagtagcaaaattacaattatgaagcagcaacaaaataattttatggttaggggtcaccacacatgaggatctgtactaaagggctgcagcattaggatggttgagaaccagtggtctaaggggagccaaagagaagttacagaaatatacaacatggctgtctgtgaagctgcaggagggggtctcggggtatgggccaacccctagtctttccagaagaacctggtctgctgccacatttaccacagtgagacctgcactagacctctgacctatacaactctaatatattatcatggtttaagtcatcaaggtgtgggggggaattaattaaaacaataggaaaaagctgatagaaactcacatgaagggaacaaaattgtgctggacaaattactgtcgattttcaaataccattcacaaactctacagtatcacttttgatcctcctctattaagagagtttgtaggctctgattgctcagtctgtagtgtagagggctagaggtggaatctaaaccacattcactgtgtcaccttctggttctgttattcgacattgccttctctctggaaagcaggcaggatgtacttttgacatcatggtgaatgggaacagtgagatcaaaggttcaaatataaatgtatgtgtgagaaagagagtgatcaatgatttctaaggaaagaggattgagtatatttgggccggaatgataacaatggtttgtaaagttaaaaaaaaaaaaaggagtggggactgatacataaaaacaatgtctgtattttctataaagtggcaaatacagtgattttcttgattcattgttctctcaacactcatagtttgtcttcagctagtaaccatttcagcactggagaggcctggtcagcttctgggttggtgaggacctctctgacaaagccagctgttggaaactggtcatgggtacccctaatgaactggctctgatgctgcttcaatgtagcctctagagatccagtgactttggtcccctcacctctaaaatagacattgaaagttggaaggtaattaacgatttgttttcttcttgagtcacaattcttttaaaattctgtagaaataaagctaaaatagaattttatattaaaattttacttgattagttttggtattcaaaagttcaacaatgtagatagtgaacacagcccttgccctctaaagaacccctttttcttctctgactgaggacccttcctaagatcacccccaactcccagctcaaagtaaacatggggatgctattgttattacagctaaacatatattttctaacatcttacataaacacaatcacataaactaagctcttttttttactagaacccttcacttaaaaaccatcattttgaaattcttctgttttgctgcatttgctaattgtagtgttatttcttagagttttaaaaactaaattaaaaaattcatccacagtcccacagtggaaaaaaatgaatgtccttaattcccaggaatctacacagcaggacagtctttgcttttatttgtccttgctccctagagaagaagcaggagcaacaggatacaagcaggcacatagaaagtgattttgaaagcaggagtgcccgaagcagtggtcgggacagaatagtcccttgataagctgcccagaaagccagtgttgttgtttcagtgaaaatctgaagtccccaggaacagtggagccaaggccaagatcaaagtataaggcccaaagatcataggcatccacatccaaggacagaagaacatggataccccaactcaagatgaatgaattcaccctgactctgctagtttatcctagtcaggcgctaaatagtctggatgatacctgttcacaatggtaaggtaccaccctctctccagcatccaatactaacattctataaatttctttatagatatatccagaagtcacattttaccatcttctgtaactctcagtatgctttacaagataacattagattaatattattacattaaaaactgctcacctcagtcccagcaatcccattgctttggcaacaaacaggcaggcagatcgtagataagagtagagcaggactgttatttcatcacatgggaaagacagtttgagaagggaaaatagaaactctctgaccattatttttagtttttgaaatacctggaaagctgaaattatagaacttgagacaatgctagatctttgcaccttattattttaaggactgggccaccataattagctcatgtgaagaattagctgaagacagtttctgataaaggttcagaaaggagaggaattgattaagaactagtgtcaaaaaggattattacccttggagccacaatcctagcacatgtatttcttctaaagtatgaaagatggaggaaaattatgtctacaactttgctttctaaacttctggtgttgcaacatattagaaaattccaattaaaaataaacatatatcagcaagacaaaacgacagcccatagactgggaaaagatattcaccaaccccacatctgacagagggctgatctccaaaatatacaaagaactcaagaagctattctaaaaacatcaaacaatccaattaaaaaatggggtacagaactaaatagacaattctcaatagaggaatctataatggctgaaagacacataagaaagtgttcaacctccttagccatcaggaaaatgcaaatcaaaacaactctgagataccatcttactcctgtcagaatgactaaaatcaaaaacaccaatgctagtttatgctggagaggatgcggagaaagaggaacactcctccactgctggtgggagtgcaaacttgtacagccactttggaaatcattatggctactcctcaagaaaatgggaatgagtctaccacaagatccagcaattccactcttaggcatatacccaaaagaggcacattcatataacaaagacatctgttcaatcatgttcatagcagcattatttgtaatagccagaaactggaagcagcctagatgcccctctaccgaaaaatggatagagaaaatgtggtacatttacacaatggagtactactcagcagaaaaaacaatggaatcttgaaatttgcaggaaaatggatggaactcgaagaaaccattctgagcaaggcaacccaattacaaaaagacaaacatgatatgtactcactcatatatggacctgctttatgatacatagtagtgaccgtgctttatcagagttgtttttaatgatattgctcagaatggtttccttctagatgatgattgagaagctaatttaaaaaaaaaatggtgccaggtaccacaagagtaacagaactgtgctgttttctgggattttgttttttactttttttttaaatggagtgtgctggatgtctctacaattttattcaaatgactgcagaacctggaaaagctgttgctgctattgatgcataacatactgccattattggtctatatatatatatatatatatatatatatatataatttgaatttttggaaactttagctgtgctgtcaactttggaaaaaagtatcccagtttaccgtgttgagttggcattgtacaaaaattaacagccatattggtctagaaatgttgaacttaatttttttccatttgtacaggggtaacacactgtattaaatatgtatggtcttaaaaaataagaagggattttgagaacccatcctatgtgaagggatgctctcttggcctggacacatggggaaggtcctaggcctggcccaggatgatacggtagactttgaggagtcccttttgagggccttaccctgcctggggagtggaggggggatggctaggagcaggtgggatgtttggggggaggagagggagaggcagaagggattgacatgtgaaacaagcttgttcctaatttgaactaataaaagaataaaaaaagaatgaagattaaaaaaataaacttatacacaggctccttttgggaagcaattactttctacatgtgtgcccataccttattggttctgttttcctagagaaaccccaggagtatagagtttctggttatagagatgcctgtgaattacttgctgtgaatcactgattaccacaggaatctcctagaagggatgtgaccaacaattaatgtggaaataagaaagtatcaatgctagtcagagacaagaaaaatagaagcttgaccacttttcttgtcgtttcactgatcctgctatgtagactctatcctctaccctctatctccatagtgttatgttagctcccttcatgcagtgtgcaaatgctaaagtcagtctgtctcttttttcattccctccctatcactttatcttcccccacagcccaaagagtatttagtctcattcactcacataaacatattcacaatctagatcttcacatctctgaatatgaacagccactcacctgcttgaaactcttttggaagattctagtgtatcttaaaaaacatatgccaaaaggatgcttttaacttaactcctacataaaatcctttcctacaattctcaagccttgtcaccaattcatcttctgaccaatacattcttggtcactcctcaggcagggtaaggccctcaaaagggactcctcaaagtctacagtatcatcctgggccaggcctaggaccttccccatgtgtccaggccaagagagcatcccttcacattcaatgtcattcttgacagctatatttccttcattcctttttgtgcccaagctagcaacatgtcttgtcaattcaaaaatcaaaggaaggaactcataaaaatacctattaaatacctgatgaatctgtctaccttaatctaacccagtgtcactaaaagagatcctgacatcatcttcatctacatcatcatgatcatcttcatcttcatcctcttacttagatgatgccaaccagtctgcaaccactcttcttatcacccgaccttgtttctcctacctggcttatgtatgcaaccaaagtgattgttctaacacagattacattcttcctttgtctaaaatactgtggactggaaagtttggggccaattctatagcctttatcaggttttatcttccagcaggtctgtctaggaccgagttaagaagctatctgtgatatggcctaacagtcgttttttgatttgtatttataacctaatacttggctcctctgtgctctttttcacatgagtttccctagtaatggttaatacaacagacatcttggattttgtgatgatgagaaggatagaggcaacaatactatttaatatgatttgatagcccatcatgttcttagtaggctctcaagtctctgaagtgcttagattattaaaatcaattattcatttgatcacaaaacatcttgagaatccaggaagatgatgtagctatattacttgaattttagcatgaagaattagcagacattccattgatatctttcaaatgacctacccaaacagatgatgaaatatcagtattaaaagtgttcatagaagacatcataaaatactctgaaatgaaaattcattaaatatttttgcatgtatcttacaatctcacctgatgttttatgccaaaaatggcatcagtagtcatattgcctcaggtaacagctaagtttgactgtgccaggatgttctgtgtgactagggaggttgtgatgaaaatgtcaaatcctgtctcattaacaacattgtaggagcaagaatgagtcagtagcctttttctaatttatattttatggtttcaatagagaccattaaaaataagccatattggatagaaatttattccagaacttcacaaaaaagaacattgtgtgagaaaagaatgtttttgatatgatacactgcacacttaagcaatcctccccagattgcatttgcaaagtaaaagttgagttcttttttatgcaaatcacaaattaaatgcactggctctatcaaaaagtggttcaggtaataattaatcaagggtaagagatcaaatgcagagtatgtttgctcacaaaagatcagacactttcacctttttgcaatatttctaagttattttgccctttgtaataaaaaggtgatacactgtaaatgtcaagatctggcgatatattaaattgttcagcatttggggagataaaacagctccatcctttctctagtacagttctcattaattcagattggttttattctctcataactgaaacccagtggttctgttcgtcaagctttctggtcaacagcatgcttggaatgagagtttttcaacatagattgaacttttaaaggaatcagttctaacctctcaagtatcagtagtctgaactctggttgtccgttctcattcccatactccacacttcatcctacaatctcatgtaagttattttatgtgattccctacactgtcctatgaaggaattgccatttactttcttttctgatgaagatattagccacatttgccagtgaataggaattatactatagaaacatagtgacttcaagcacctttcccatcaaaactaccaagggatcaagaacaaacagatgacacagcctccatccaccaatagaataaatgtaatttccttgagaatttaaacccaaatcacaatattatagtcatatgggtgtaggtatcagaaataacaagactgctttagagtttgagagactgagaaaagctgtttcaaaatcaccaccaatacgagcaaacaatagacatcaggtaaggatgggaaatgaagctgacaaaccaaagtcaaacagaagataacatgaagggaaccaaaggcattaaaagaaaagaataaagaaagggaggaggtaaggcaaggaagggaggaggagggatgggagggagaggagaagagaaggaaggggtaggagaaggaaagagagagaaagagaggaaggaagcaaagagttaaggaaggaaaaacaaacagaatttgttccttaagagtcctaggtatgactggacttttctgcttggtcttgcatgatagaaaaagtgactattgaaggcttattctaaatcaccttgacttaggctagcccttatggtcagggtcacaccaaagttgccttctctatgacaccacagtagagagctcactgagttcagtgagttcatggacagatggaaatagtaagctctctcttagggaaagaccatgctcacctgcatctgcagtatatttgttgttgttatgtctctgtatgtactattgttatctctctctctctctctctctctctctctctctctctctctctctctctctctgcactattgtgatagttaattgggaaaattctttggaatgttataataaatgaaagcagcttaaaaatcagactcttgaataaatagtggaaaattttcaatattgtctgcatccaaaaccaaaacgtagatcttctctagaagaacatattaagacagatggtcacatagctgtgaatcaggaccaactcaagagaagccatttttttttgttttgagccaatgtgttaaacaagaaaaggtgctgacatggttgtaagcaccttcttcttattactgtatgccatttctgacataggctctaatatgtgactaatggaatccttacatatgttttgtaaggatagcatcacccctttcacagattgggagatttgaggcttatatttcaagtctagagccacagagatgttgaattataagtccacttttaccctgagacaagagaagatagaatacattttaaaactacctttaatacatgaatttgtagagaataagaatttcttgggcaatggaaaatcatcagggtaataaaggagtctacaaatctttcttgttttcttctcaaatagtgaccacattttcatcttcctatgtgttcaaacatacattcacatttacatacacacacacacacacacacacacacagagagagagagagagagagagagagagagagagagagagagagagagagagagagagagagagagagactggctagatttgctatacactttgttaaattggaattacaatttgataatgatttttctgttgatgctatactcttcttatgaaagctactgcactaagcatttctggactttacctagagatttttcatgcctctgtgccaattgtgcatcatcttgagctgctgttgagaaggtgtttcaccataggataactcccatctcaagagtggattccagtaacactgcaaacattgcaatgcaccttatatgaatatttcttctggtatcattagtccccatcaggaaaaaaaacttgatttcatatgctagaagactttctttttggttttttgttttgtttttttgagacagcatttctctgtatagccttggctatcccagcacttattctgtagaccaggttagccttgaactcatagagatctgtgcatctctgcctcccaaatgctgggattaggaattgaatctctaatatcctcagattgttagtcaagtgtttggtgactgtggcaaaaatcttatatagtgatagaataacaattttttgcattttataaccaaaatccaatatttattcttgaggactatgacaatgcattggggaccattcagaagaaaccaagaattttgagatcctgagaaaaaaattagagacaatttcatctaatacctccatttccatatgagggaactggtttctagtggctgagacattggtcagcactgcataccaggtgctctttgtactacatgatgttgattcagtacgcaatgagtcatgggggagtggagaacatgcatttcactacttacatctgtagtaccaacatatctgactctgtgagtgtactacttagtgttagtttcaaaaacatatccataaaatgaaacttagattaatcatgagtcatcataaagttgggaaaactgtttatttctattttgataatgcagtcttttctttcatcgatagacagtaagtgtctctgatattattaaaaaagaagctagaatctcctttaatggtagggaaaatgcaacgggaaataggaaccagctggagcttccctaggtccagaagaactaactcttggcctcatagctccataccttggtgatgaaaagatcccctcggagtccttcctctgactcagatgagaggcaaggccagtaacactttattctttcctgcttctcttttaaaattatccttaattctgaagaaataaaacaaaaaccttggcagataacagcccgaaattccaagttctattccaagatctgtctctagccctgagcttcacacaaatcaattggaagcttttggcacagttccacatcctatctgattatagcaataaatgaaaaagcactataatttataataaatacatatttatggtgacatgtactatgctgcttttgaaacacaaatgggcatccatctgatttgttctttttattctctcttgtgctgcattatagggacaacttctttttaagtgatatcatcaatgccatcacagaaagaaatggatttatatacctgtgacctagagaccaaggtcttccatacacatactgaccaactcaatatcagagaagtataataagcaagcatgactaaaactcagccatgttttaaggcagggaacttcacttgtgagccttgttttctattttgtagaggagagatgacaacagaactgttacaatcacaaaatgaatggggttggtcaacaaaaaaattgatactacatgtagtaatccacatcattcacactttaaactatctgtggttaataaggtactttgagaggaagtaagaccacatttatagaaatttattcatgatttattaaatcatgctattttgtcaataatttagagtgtctaaatttatctatatttgtctttcaacattattcatgttttgcatgcttgggaaaaatagagtatcaaggttctcactatctgtatctcagtaagttcaaatacttgacaagaagctgcttaagagaaggcagatttattttggtttacagtttgagaacctacaatccattgcggcagatgaggcaggaatgcagacatggctggtcactatagcaacaggggggtaatgtgaatagctaacaccatactgacaagaaacagcgagatcaaggtggagctggaatcaggatggaaccagttttcttctagctacaacctcaactctcaaaggtccctctccatctccactagctaggtactgaatataaaaacacatgagccttgggggacacttcatatcaattactcagagactgtggaatatgtctagttgtacagtggcactcatggaccaaaagtgaactggctcggtcagctagtagcacacaaacacacagaacagcaacaactccagagcatcagtgcagttctgtttaataccaaccatctcaaaggtgcctactcattttgtgtttattttgtctctcaaattagcacctagagagaagtgattagatattctaattgtctgtgatttgcaatgtatgtattgtattgtcaattattcagcagctaccagagtaagacagctttaattatccaatgactccttgatatttccattgatcaagaagaattgagtatggagtatctcaaagccatagagctgagctaagcctttgggggtacagcaacagtatcaaaggggtcacataaggactgctactttatatagtttacaagttagagaaattgggtaaggtggggggtggctgaaaagatggggtgaaaatgttgtcaagggtaaaaaaatcaatttttaatgatgaagatgagtcaacacatccctcaaaacgcttgattctatacgggtcttctacagttgttctgaattctttgttccaagaataggagctgtgtgcctagtccccaaattttgagccactgtttccctattacagactgaaaatatgtgtttatggttcctaaattctattaagggagcattctcacttacttgctatgtaaagatcatctagtaactaaaacacaagcctgtatcaacttccataaaaaataatatacagaaaattccttggaagtaacatcttctgttttgaagaaattgtgggatgtaacttgacagatgagaaaatatgagagaagagggccaaatttagcaagacaatggaaaaaggcaacacactagaaatctcagtctgctaccagctggatcatgttcccaacacagcacccaaaaatcatcctcctcaagcccaggcctgttgcctctttgtgtaggtagctcatgtgtgtcagtcattcagaggaacagctcgctcattgccccagagcctgaatttccagaagactaacttgaaatgttgtctggttatatattttaatcactttcagggacacacagaaatgcaattaggttaacaaaaaaaatcgttcttcagagacctgcttagtgagagaaaaacatttgtataatctttgcatagacgtgctcctaagtggaaattctaagattctaattcttatactgattttttacatgaaatgaaggataatgagtgtgttcactaaattcagtcctctaccagttattatgctgctgatggccccagtgtctctgaatgtgaggatttgtctttcaatacttctctgagcaaggaattagattctcagtgtgctacaataggaaaaatactgagtcgctttctgatttctctttctcagagaatcaggaacaaagcaatgggcatcttgaagattataggatcatgtctaaatgtacacatttgagacaggaatgtagagagaagaagcagagttatgcaaaccaccccaaacacagatggttccaacagtctaaaagatgatgccccaagtagttgggcaggatgcatacaatgcaccagggttgtatgatgggcacatccctcacattgtggcatttgtgtaatgtcctagaaggaatacagacatagattacaggtgtcttttctggaagagaaagttggaatttgaatacaaggcaatagcagaataaaccacaaagacaccatctgaccaaggggaggatgcagactgatattgagaggactcctccagaacaatgcctagatcctatgatcaaaggaaagccccagtctactgtagaatgatagctttggggctcaagaaaagacctaaaatagtttataaacaaagtaaatagatattttacaggtcattgaatggtcatattgtttataaaatgaattcttatgcagcttagtgtgctcatgggatagaaaattctggtgcttgaatacactggttaagtaacatactacatctacctacgcaataacctctgtgctacaaatattgttacatgttctattcttggctagttcaacagataacttcagagtcctactgctcttggaagaacagaaaagtaacttttactctaacaggctcttctatgatttttttgtttttgttgttaagaacaataaaacttttacttgagatatattttgataaagtctgtttaacccaaaggagagcaattgatataactgattttcagtctttgctcatgccacaaaccctttgcctcagtgaaatagtacacaaggtggtaattagctaagatcagcagtgtattaatataaataagatcatagttttcaaagttagctaatactgtctgtctataagaatacattctgaactatgagatgtgaaagcctgttcttttctactaagagacagaaaaagagtggatttggaggggaagggagatggggaggaattgggaggagtagagggagggaaaactataagtaggatatattctataagaaaagaatctattttaaatttgaaaagtcacacctgctttgttaccagtttcttcacatactttattttagttgcataattctacaatgttttcacatcatgttgggcattagtatacagttttatatattttttaaagtccagtgtagtacgtttaagctttcaattaacaacccacttaaaaaattcaaatgcctgtgagttttgctcagagaactaagctgtatccctgtctaaatatgacaatgtttatgcaatatattatagtaaattatgttcaagagtgggggattttgaagtgtttatttaatcaaatctgaatcaagatttgaaggagtcctggagaactccatccaaatgacattggttaatcacttgtctgtattaaatcttgcccattgtagatccatacaaactacataggaaaaggaagtcagaacttgggacttggaatcaaatatttctagtgacagtggcattagacaaatatcgaaaagtcaatcatacctagaattccagcagagaacataaacctaccaaagggactggatgaggttgaatttgaaccaatgaattcatggccttctcataagcaccctgtcagaattcagagctaacaaatatctgtgctgtgacagttcagcaagagtgagcaatctagcttgtaacctgctcccaatagcatctgccccatgaagcttccacacttccaccccattcatggcaatatggaagtctggagatggcatggagcagccacatgtgaggaagacccaggaagactttgccctacatctcctgaaaaatggaactttccagcaatccaggcatgaggtgagatgactcctcaccttggagagccttggggtaatttccaaacttgcactgacaaactaacaagggaaacgccagaggtgatgaccaaatgtgtgtattctttataaatacgtggtatgagaaaaacaatccttttaaaagcttagagaaaaggtttttttcctctagtttatttataatatcaaccaaaactactggtatctttagagataagaagttagtgttccaaatataacaattggtaaaaaaaaaaatcaaaaacaaaccataactaattgggcaaatcactggagactgggaatcaatcaaagctctcttattaagcctgcttcacacctttcttgtgtgtttctacaggaagataataagcaagcagtacagaaaaatccaaggaattcatttgcttttgaaatttcaaaggctacgctatggttaatatacatgagctgcaaactgctatggaaaagagaccaacttctaagacaaaaaggcactcaggaatgtgtcacaacaaaacatttcaagacaaaatatttctatgaatttgtgccacaggcttaccacagcatcatctgctcttttatggatgatgctgaaccctgccttatacactttgaacactccatttatcacttccattagaatgaatcccaaatatgcatttctatgctcgactatatccctaaactctaatcctttatcacaaattgtattttctctttgcactgctatttcttattcagcagccatttttctccccaaattacctcatcctttgccattcccattggttatcagatctgattagatattctttaatttcatttcttcaattttcttaactattttttaaatgtctataagaatgaactttatgcctgacatccaactactgcattggtttcatcatccttttccttccagatatttatctaaattactgatttagtttttatatgctaatattgagttccttaaaatatcactcaataaaatatcaattactaggataacctatgataggatttaggcccaattttaaaaaaaaattcaaaaagaggaaaaaatgtattcaatggtgaaattttaactggcatgtggaatgacacagacttggggttactaagaagatcatgaattaccaaaagcctgtgaataacaactataaccaagtttaataagactgcatcagacttgagacatgaccatcactcagaggaacacagtgtcatctctcctccttgataagattttctatttagcaaagactgatattatacatatcataaacccaggtctttccctgatcatctggatggaaactaggaaaatcaaattattttaggttatattttatttcaatgtgtctgaggaccaattacacagagccagatttaagggcataatgcttcataagtagtatagtcatctttaaagttagcaactagtagttaaattctcatatactgagtactctcaaaatagaatgtacctttgtaatccccatattatgtgagtcacactgaacactttataacttgatgatgctacagatgaaagtatctttgcatgtctgatacggaacactgctgaagaaaattgtcaaaattaattttgccatttcaaaatgaaataatacaagaaataaatcctaaataaatctgcctcattgtctctgagaccaatgaactcggtcatctggagcacaagcaaataactttttataagacaaatactctcttagaaatttaccaaatatatttcaaatgtttaaattacctttatgagtataaggacaactttacagatgaggtttcctatgaagtagaatgcaatatgtagaagccagtttggtgtttcaatactaagttttctctaccccctttggaaatgaaaagagaaaatgtttgcatctagctatgtatacacataggtgcagcagacaggctcacccaagtcagaacagaaccatcatcatagaaatctgagggcctgattaggctagcaactcccaatcagttcactcaaaacagtcagattattcagtcaccaacaccctccagattattcagtcaccaacaccttccaacgccataagctatggaattaattccactcaccttcatcttagttcttgccctctggattcaagtaataggtaatgttatttgagccacactaaccgtcccatcaggactgtaaaacttccaatgacagtactcagcacctgcttggagtctttggcgaatgatcagcagttaaacaggaagagaaaaaggcttcatctactgaagaaggctcatagggtttatggctattctctaaaaatgccatccattttttctgatgaagggcttggactcactagaaagtgaagacccgggtttaaatctgtggccactagaaaattatcagtctaggaggaaaccccttccaaaagagacatacaaagtagacagcccaaaaacctgcataaaaattgctctcaagatgcctgcataattctcaactgcatgttgtcacattaagactacaagtaagtgagaaagaaagagatcaagacacagacataaagacagacagaggtagactaaaatgatggagaacctcaatggcatccttgaaaatcagagaggcttggtaacatccttcatttaatgatgggaatgtccttctgtatatgtttctcttattggttgatgaataaaacactgattggtcattagccaggcaggaagtagaggcatggctaccataggagaattctggggagaggagaaagagaggagtcaccagagagacaccatgtaactgttgggaagataggacactggacattctctggtaagataaggccatgtagaaatacatagattaatagttatgggttaataactaagaaaaagctagccagtaagaagcctaagccatttgccaaacagtttataattaatataagcctctttgtgttcattagggactaaaatgctatgggaccaggcaggacagaaactccacctccattttgatttgtgaaatgtctatgttcttgaaaatgaaagcctcagccatgactaagaaatagttcttgggctgagagcaaaactggaagccaaggttccagaatatcaagatgatctgggagcaacatgactgactgttagaagaatatttaatactgttcagaatccaaattctcctcattgtcatttaatatccactcttagtaaagaaccatgaaaatgagactcgcagtccagaaaaatacttgagagaaagcagatgcagaaactgtgcaaaaaattgtgaaattaatgaacttatgactgatgttaaacaaactctaaataaaaaatgatacatgaataatggagatttcaggagagagaaaaactgtagatgactaatgagaatctaatgttgatataatgcaatctgcaaaatattggacattcaattgtctgtgaaaaagctttcacaagattaaatactcacttctaataactcctgatgtgaataagtagatacagaccaacagacagacagacagacagacagacagacacacacacacacacacacacacacacacacacacacgtataccttcattaattcttaggagagaatcattaatagtcttactaagaccaagaagaatacaggtaaacctaatatactttaaattatgacactaacattgaactgagggtgtggccaatgcaattagacatgaaaaagaaggaataaaaatctgtttgtaaatgatatgagtatgtatccaaaaatgttgggaaaatcaatgataaactaatacaagtagtgaaagtattagtcaattatcaaacctcatatacaaaaagataaatattctttatatgataaataatttataagaatagtatgtaagggaaaaaagtttcaaatgacaataaaatactcagaaatcaacatatataattaatttacaaatatttatgatataaaatgatttttatttaaaaatttaaatgatataaatggagagtggcatgaagtgaaaatactcttgttattttttgatcaaatattgaaatccaggacttcttaaaaataaattatcaatttaacatgaaaagcataaaagtctttttttccaaagatagatgaacagatatctatactcaaacgatacaataattatatatgactaattcaaaaaacagcacaaaagagctctgaaaaaatatagctctctttgttactgaaatatgatacaaagtctcctttaacttacagcagtgtgggggctggtgtatgactacatagatgcagcagaataagggggcccaaaatagagccaacagcttctggggctgtagcatatgatcaaggtgacatctcaaactgctagggcaaatatatactcttaagtacttttgagtaattgttaagccatctggaaaaagataataatagatctattcttcatacatatactagaacaaactcaaactccatgaaaaatgaatttcaaaatgaaactatccaaataatagagggggaaatgggtaattcattctgtaatccatgtatcaggtactgctttccaaatgtgatacaaaaattcacattcaacaaaattatctttcataactttggtgagtgtatataagaaactttatatgacaaaatttcatagtaaggaaattaaaaatggcctgtagactaagagcaaatatttgcaatcttatctttcataatgaaaataaattcagagtatataaagaatacttaacataaagactaggaaaaacagccataaatgttcaccctgtacatcaattagtgtggagaaaaagaacaaccatgccagtgaaatggttatgcaaggatgtaggagcaactgcaacaaacaagatggtgaggccagtgtggaagcagtctggcagtttcttataaacctctgatacattgcagcaacctcttggttagcccctaagaaaaatgtcaatgcatactcacaaaagtatgaatattaatattttaatgccagaaaaagtgtggcaggttaatataagaaatctcactaaatatacagcaacaaactattggttcatataataacaaaggcaaattgactatctattagaataacacataatcaaaacatttaaataaatctttagaacaaatgacaggtaacttttaaaattgtattttggccaaacatggtaaaatggaatcatggtaaagaatcccacacaacagttcttcagttggtaaatttgttcctcctaagaattagacttaatatttctgaaactttgtgtatgctaggtaatgtgtaaatgcattgtagataaaggaatccattttcaccagtgactgagaaagaagttctctgtagagacacaataaaagttataataaacttagaggtgcttcattgggtcacaggcatcatcatgggctgttatatacacatagaaaaacatgggtgtgaggcatgaattcatatacatacctaaatgtctcatctcagtaacaacacaaggtataaatacccttagcaaacacacttttcactgaaggaaacagctttgtattagagaaagatgtctatgatgatatacagaaattaaaaaatgaccatagcaacactacaggcataattggtataggaaaaaacaaagaatggatattacattacaggcaaatatagcagaaacatttgcacaagtctcaatgcatcttccaccaaacatttcctgtttctaaccaagcaaatagtacatttaaagaagcatgtcagtcgtgaccttacctaaatgatggaaattataactacaaataacatgacgttattaccatggcctcctgatgtataacactgaagaaaacacaccattgctttggtggttttttatgactcaaacctcaacctagtcacaggaaaatatggaacaaatggtatgcttcaaattgccaaggtaatgaaagacaagaaaagaagtgagtctaccaaaggtttgagaagaggagatactgcagccaaatgtaccaagccatttggagcccagaatagaatgttagtgcaaaaacagcaatatttggataaaatactctgtctagtttcagggtgtgccaatgctaatttcttaggttaatagcttaaatatacagagaaaaatcatcaaaactaaacagaaggtaacagaaaagatctatgagtacattttacattgaactatggcaatactcttcttttgcatctcttctttattaaaaactaaacacataaacctagtcaaaatatacactgaaacttgagaaaatatttatgttgatgagtacttaatagttaatataaatattaaagggggaaggcacagaagaatcttgcaagattagcatgaaatgaatttatctcttaaataatttcaggaagaaatttcatgaatataaaagtttaggataaattcatattcatcctcaacccagtaaagaaaagctttcaattaagactattcctgtagtaacgaacacactcagtattcagaagtatttccccaaaacatttcccttcagaatgaatcaaggccccagggaggaatggctaagcacagcagagatagataaagtttaagatgagcttgatccatttcaggaagccatagagtacggaagttattttttaaaatgatgtaactattttgaaagtaataaatatgtagcttcaaagggtacccactgtgcatatctggaacaacccaaaaatcaaataaaagtaagcaatttattataaaccacctaacaaacagggcctattaatccatgctaaccagatagctgatagatggtagatggattgatagatgatagacttataaacagtggaaggagaagcttctaaaatataacaacaaccaatgaatgaggtaaaataggaaatctaccacttttaaagcatcatcaagaattagaaatgtcaatagatattaaatataacgggatatttggtgaaaataggatgtttgattggccttataattttttcacaagttgccaaaaagttgcagagattaaaatcagtgtctgccagctggggaggcagcataggacagaaccaggccccttgaatgggcgtagcagttgggacacctgggaagtctatggggcctctggcaggggaaccagtatttatccctagtacacaaatgggctttgggagcccattccctatggaggagtactccctcagcctagatacacggaggagggcgggctaggtcctgccccaaatgatatgtcggacattgatgatccctcatgggaggtcttaccctccctggggagtggatggggttgggatgggggtttgatgggggaataggaggatgggagggagaggaaactggtattggtatgtaaattaagattgcttttaatttaaaaaatatttaaaaaaatcagtgtctgcattgaagaaacatgaaagttatataatattacaatagtaatattacatcacttgactaacagacttcttcattcagattcaaaacatactaacttataattacaaactatgcattattgaatttgtatatctatttatcagaagattaaaatgaatagtgggaagcaaatgctcacaataaatatgcttaaaactgatgcaaacagaatataaaaagaattcctatgattaaatgaggaaaacatccaattcaagttttaaaatggcaaaagatttgagtagacaattcacaagagacatgtgaaattttagtagcaatacaaaatatgctcaaggttattactcattggggaatagaaaattgaaatcacaagttacatcatatacttccaggaatggcttacaacaaaaagtggacaacacagagaattgccaaggtgatgaagaaactagaatgttatttgcttaggacaattttcttaaaatgtttattaaaaggcataggagctggcaaaattgctcagtgtgaaaaggtacttgccaccaagcatggtggcagaagcttgatcctcttagccaacattgtaggaaagaaacaacacctgttgtccctatggttttcatatacatgcatacacagatgtgggtgtgttcgtgtgtgtgtgtgtgtgtgtgtgtgtgtgtgtgagaggagagagagagagagagagagagagagagagagagagagagagagaggaagcagagatccacagccaagcactgggctgagctctaggagctcagttgaagagaggatggaaggattttatgagcaagcaggggtcaagatgatgacaggaaaacccacagagacagataacctgagctgtgggagctcacagactctggacagacagctagggagctgccatgggaacaacctaggccctctgcatctgggtgacagttgtgtagcttggtcttttgtgggacccctagcagttgaaccaggacttgtcactgatgcatgagcaagctctttggaacctttactctatagtgggatgctttgttcagctttgaggcaggacctagggatatgttactccatctgaatggagagggaggcagaatggatgacaggggtagagggaggtggagggatggaactggaggagaggagggaggggaaactggttggtatgtaaaataaatttaaaaattaaaaaaaaaaagaaatttggtcacccctccaccctctgccccaccgcctgctgcctgagcctgagcctgagcctgaggtgagttctgggcgctgctctgcccacgacctcccccataaccccctgctgggttcttcctgaaactacccctggacaagactgaacccagacaggaaggcccaccccaccctgagtctggacgcacctcactctagtcccccctccaccctgtgccctctgcctgctgccagagcctgagcccaacacatgttgcctgagagagggagggaccccacctgcacccaccggaagaagatatgggaagaagatagaagaagaacatactcaacaacagaaagaccaatatgacaccaccagaatctagggactccacaccagcaagaactgaaaagcccaactcagaggatgaagaagagatgggccttaaaaattatcttatgaagatgatagagaccattaaagaggaaacaagaaaatcccttaaggaaatagaagaaaaaaacaagcaaagttacataaaatagaggaaaagacaaacaaaaaaatccaagaaataaatctctaaaagaatctaaagaaagccaagaaaaaacaaccaaacaagtgaaggaaactattcaaacagttcacagtttgaaagcataattagaaataataaagaaaacacagaatgaagggatgctggaaatagaaaagcagggcaaacaatcaggaatctctgatgtaagcatagccaatagaatacaagagaggaaagagagaatttcaggtgttgaaactcattagaggatatatagtcatgcaccaaagaaaatctcaagtccaacaaatccctaacacaaaatatccaggaaatatgggacactgtgaaaagaccaaccctaagaataataggtataaaaaaggtgaaaaattcagctcaaaagtatagaaaacatattcaacaaaatcatagaagaaaactcccccaacctaaagaaggatacaggaagcttatagaacaccaaatagattggaccacaaaaaagaattaccttctccacataataatcaaagcaccaaacttacagaataaagaaaaaatattaagagcagcaaaagaaaaaggccaagtaacatatacaggcagacctatccgaattacaccctacatctcaatggaaactttgaaagccagaagatcctggatagatgtcctacaaacgctaagggaacatggatgccagcccagactactgtatccagcaaagctttcaatcactatagatggagaaaacaagatattccatgacaaaaccaaatttaagcaatacatatccacaaatccagccctacagaaattactggaaggaaaactccaatataatgaagataactatgctcaaaaaaccataggcaatagataatcccactttagcaaacaccaaaaaaaaaagtcaggaaatctacacacaataacactaccaacaacaaatccaaaacaaacaaggatcaatcaacaatcagtggtcattaatatccctcaatgtcaatggtcttaacttgcctataaaaagatacaggctaacagactggatatgaagacagaatgcatccttctgctgcatacaagaaacacatttcaacttcaaagacagatggtacctcagagtaaagggtttggaaaagattttccaatcagatggacccaagaaacaagctggtgtagcaatcttaatatctaacaaattagacttcaaactaaaatcaatcaaaagagacgaagaagggcatttcataattatcacaggaaaagtccatcaaaatggaatctcaatcctgaacatcatgccccaaatacaaaggcacccacatttgtaaaagaaatattactaaagctcaaatcacacataaaacctcacaaacttatagtaggagacgtcaacaccccactctcaccactagataggaccaccagacagaaactaaacaagaaacaaaagaactaacagatgttatgacccaactgggtttaacagacatatatagaacattccatctgaacacaaaaggatacacattcttctcagcgccacatggagccttctctaaaattgaccacatactcagcaaagtagcaaatcgacacatatacaaaaaaattggaataaccctctgtattttatcagaccaccatgttgttagaattcaacaacaacacaaattgcagaaaccctacaaactcatggaaattgagtaacacctagttgcaccattcctgggtcaaagaagaaataaaaaaagaaattaaagacttcctagaatttaatcagaatgaagacacaacatacccaaacctatgggacactttgaaagtagtgctaagaggaaagttcatagcaccaaatgtccatatgaagaaactgcagaatagtcacactagagaattaacagtgtaactgaaagctctaaaacaaaaggaagcaaactctcccgaaggagtagataccaggaaataatcaaactgcactataaagactcaatgaaacaaagagttggttctttgagaaagtcaacaagatagacaaacctttatccaaactaaccaaaaggcagagagagcatgctaattaacaaaatcagaaatgaaaagagggacataacaatggacactgaggaaatccagagaatcatcaggtcatactttgaaaacctgtactccacaaaattttaaaatctaaaggaattggacaattttctggatagatgtcacttaccaaaattaaatcaagaacagataagcaatttaaacagacctataacctgtgataaaatagaagcagtcatcaaaaatctaccaacaaaaaaagcctaggaccagatggtttcagagcagaattctaccagaaattcaaagaagatctaataccagtactcttcaaattgttccacacaatagaagcagaagagacattgccaagctccttctatgaggctacaaattccttagtacacaagccacacaaagacacaatggaaaaagataattacagacaaatatccctcattaacatctatgcaaaaatattcaataaaatactggcaaatcgaatccaaaaacacatcagagaaatcatccaccatgatcaagttggctttatcatagaaatgcagggatggttcaacatacgaaaatccatcaatgtaatccatgatataaacaaactgaaaaagaaaaaccacataatcatctccctagatgctgaaaaagcctttgataaaattcaacatcccttcaggataaagatcttggaagaacaggaataacaggaacatatctaaacatgataaaagcaatatacagcaaaccaacagccaacatcaaactaaatggagagaaactcaaggcaattcctctaaaatcaggaacaagacaaggctgtccactgtctccatatctcttcaatattgtactttaagtcccagctagagcaataagacaacaaaaggaggtcaaggggatacaaattggcaaggaagaagtcaaactttcactatttgcagatgatatgatagtttacataagtgacctgaaatacttatgtaactaccatggaactactacagctgataaacaccttcagcaatgtggcaggatacaagattaactaaaaaaaatcattagccctactatatagaagataaacgagctgagaaagaagtcagagcaactaacaaaataaaacatcttggggtaacactaatcaaaaaatgagaaagacctgtagagtaggaacttatggtacctcctgtagaaattcagtacttatccctagcataggtgtcgactttgggagcccattccatatagaggaatactccctgagccaagacacatgggggtgggcctaggccctatcccaaaggatacaatagacactgatgacaccctatggaaggcctcaccatccagggagagcagaaaggatatgtgatagataggattttagttgtgggggggggacgacggtagggaaggatgggagggagaagggaaatgggattgtcatgtaaaacaatcctgtttctaattcaaataaaaagagttggaaaaaataagtcatacttaaaagaaaagaactttgagtctttaaagaaagaaattaaagaagataccagaaaatggaacgatatcccatgctcttggataggtatgaccaacatagtaaaaatggcaatcttgccaaaagcaatctacatattcaatgcaattcccatcaaaattccaacacaattcttcacagaccttgaaagaataatactcaacttcatatggaaaaaaaaaaaaaaaacagcatagccgaaacaaccctgtacaataaaggaacttccggaggcatcaccatgcctgacttcaagctctattatagaatcttagtcctgaaaacagcttggtattggcacaaaaatagacaggttgaccagtggaatctaattgaaaaccctgatattaacccaaagacctatgaacacctaatttttgacaaagaagataaagttatactatggaaggaagaaagcatcttcaataaatggtgttggcttaactggattcagaaatgtagaaaattgcagttagatccatatcaattgccatgcacaaaacttaaatccaaatggatcaaagacctcaacatgaattcagccacactgaacctcctagaagagaaggtaggtggtaccctggaacaaattggtacaggagactactttctgaacataacacctgtagcatacacattgagattgacaattaataaatgggacctcctgaaactgagtagcttctgtaaatcaatgacacagtcagcaagataaagcgccagcccacagaatgggaaaggatcttcaccaaccccacatctgacagagggctgatcaccaaaatataaaatgaacccaagaagctagtcaccaaaacaccaaacaatgcaattaaaaagtggagtgcagaactaaatagagaattctcaacagaggaatacaaaatggctgaaagacacctgagaaagtactcaacatccttagtcatcaggaaagtgcaactcaaaatcactctgagataccatcttactcctgtcagaatggctaaaattagtaacaccaatgacaatctatgctgaaggggatgtggagaaagaggaactctcctccattgctggtgggagcacaaacttgtacaactactttggaaatcagtatggtgatttctcaggaaaatgggaaccagtctatctcaagatccagcaattcctctcttggacatatacccaaaatatgcacactcatacaataaggacatatgttcaactatgttcatagcagcattatttgcaatagccagaacctggaagcaacctagatgctcctcgactgaaaaatggatagagaaaatatggtacatttacacaatggagtactactcagcgggggggggggggacaagggaatcttgaaattcgaaggcaaatcgatggaactagaagaaaccatcctgagtgaggtaacccaatcacaaaaagacaaatatggtatgtactcactcatttttgatttttagaaatagagcaaaggatcactattctacaatccagactaccagaggagctaggaaacaagaaggaccccaagagaagattgcatagtccctcgatgaaggggatggggcaagaacccctgaccaaagtgggagcccgggggaggggggcagggagaggaaggagagccttcatcctgttgctggtggaagcagaaacagacacctacagctaagcactgaaccatactagtggaattcagttgtggagagggaggaggaatgagcaaaggagccaagacggggctggagagacctgtagaaacagtggacctgacctactgatagcatggagacccttgtcataaagctcgggaaacagcttggaccaaaccaagtcctctgaaagtgggtgccagctagaaggccaagacggtctatgggacctttaacggtagagccagtctttatacctagagcacaatggactttgggagtccattccctatggaggtttactattgtagcccaaatagagcaaggagggcctaggcccctcccccaaactatttgacagactttgaaggtccctggtgggaagcctcactatctctgaagaggagtcaggggtgggttgggggggttggtggggaacatgggaggatgggagggtgagggaatgtggggatgggtatgtaaatatgagtagtaattaaagaataaaaatatttttatgaaaaaaaagaaatttaaagatagtaattgcattattaagtatactttccaaaatttggactatttatcatctgaaagagacaaaaacattcacagcattttcaaaacaatttctgaacttgtaaacaatgtctacaattatacgtataactaaatcacatgattgaattcatataaaggaatcctacttatcagttacatggaataaactcttaccacataaactaagaatgattctccaaaataccaaatggtgtagttaaatctgttcattttagttcatgtaattaaatgttccttttaaaaaattaaatttttaattaaaacaagaaaaacttaggtcttattattgtgtctagttttattttagagagatgactatcagacagataggtaactaatgttttgtatttctgtgtctcctgatctataggccttcaccattaactgaaccagtctttaagaatttattattttttcccacatattcaaaagtgtactttaagaatattgataaaataagcaaatacaaggtttgacacaggaactaattaacatccatcagcttcagagtaaacccaacacaagatacaaacaagaagctcaaaatctttaaaaataagtcagtgctaatatttgttgctaaaaactagaaaaatattaggaaaacatactaagaaatatcttcttgaactacatcaatgaccatcatagtatgatgaccctatagggacagtaatggcatacatgctccctaaatgaacttaaggcccacttaacaagagggatacccagtactggaaacctatacaactaatcagtgttagtaaaataatgattattggaggaaatctataaccactaatttactgaaacaacataatccctaacaacaatttataaacatttgttcacaaacccacacgtaggagtagtcttcatcccttatcaaggcaacctctctttgcaacagatggagatcactgaagaaacccacaatcaatcaatatgcagagatgtgaagcccaggcctaatggatacatatacaaaactttcttgcacctatgtcttggaaaatattgtagaagaggggacagaaagactgtaagaatgtttgagacagaggaatagggaccttgctggaagattgtgtctcttagtggtatcaaattctatagctgtattgtctccccaacatgaccacctaaatgtgagctgatcaaggaggacatcaaggaacatgccaaaatggacaaggaaacccttaaacaaagaactacagacaactgagtaaagatgggagtgggagaggaggccctattcagagaagagcacattagttagtagttcagtgtcaaatgatcatccctgaatgcatacatatcaatgacattatatgcactcaaatgggttatatttgggaataaatacttatataatatacatatatgcttgtaataacatttgatggaagaggccatgaatttgaaggacagtgggaaggtgtatatgggagggtttggggggagaaaaataaggagaaatataattataatacaatctaaaattttaaagtaatgaaagaaaaccaaaagggagaaggagggagagaaacaaaaagacagacagacaggaagaagggaaggaagaaagcaaaaaaggaagggaggaagaaagataggtggggggagagaaagggagggagggaggaagggagaaagagagggagagagggagggaggggaagaaaatgttttctgaaaatgggtgaagtgatggcattgaaccaatgaaactggaggaggttaaggaaaaaaagaaggggtgtcttcaagacaaataatagcaaaagatctaaaatttacagtgagagacttcaggtgtctccaccctggtgtctggattttagaaggaacacaaaaatgcactcaccagcaatgtgcaggtgggaccagagaggcatgacacacacacacacacacacacacacacacacacaatgtgcagaaggcatgagagaagcattggagtgtctgtctgttttaaaggactgttctgatgggttcctgtcaagatccagactcttttcttgttttcttggtataaatgtttaaattataatattttttccatcacttggaaaagacatgtggccaaaccaccagtaaactctatctaagcacaacatattagggtcttgttgttttgtttgtttgtttgtttgttttttgtggttgtggtagtaggtttttgttgttgttgttttaggttttatttgtttttttgttttgagctaggagattgaataggagcttgcatcagcctggtcttacaatacctccacaaatggtgcagaccttggagaaaagaactctgaagtaagaaatgcgattctgactaattcattagcaaatctataaacatgttggggtttggaggctcataaccctctggtgaacactcacactgcttctcacaagccagtgtggatgtgcttcgttggtcctgacatcacaccctatttagcatttttagctgctgaaaggcattcccctttgtacagtaagttgcctggccactcaagcgtggtgttctaagaggattaagcatgatgaaagcagacatgcctaacccagggtccccattcaattcatgtcacatgttcctgtaaacccccttgctcattgacatcctataagcacctgcagtatttccttgagagaattaaatttattgttttgctttttgcctagatacccagaaggcatttttccattgacttctctcaagtttttttttttcttcagttacttgagttacctttgctgaaatacactatttcatgcatgggagagaactgttgactttttaaatacttgagtggttttatagatatactatacttaaagtcttaaattttaaagtatattttgaattaaacaatttaaaaatttgcccactggacaaaaagtttctaatatataacataacttgacactgagaaggattgtatctgatgaaaataaaataaaatgttagatttctatcaggtaatatttaaagatcatattataggtggtgatttcttcagaaattgaaaaatcaatagatatttcccgaacagagcaaacatattcatatttcctaaggagttctctgtccctttggatgaggaaaacatctaaatggataaccctcagaggcatcatggcatagtctcttttctataaaagggtcaaatgacatagagaactgaaccacgaaggaactgaggaactggttgctggctatggttactgaaggaagtgaatagtttaaatcccataatagaaaaatcaccttcaaaatatatgatctaatcgtaagaatttaaaagttatacatgtacttttcagtgaacaatgataacaacaactcaagtaaatataaataattcagaattgtcccagataaaaattgtgtaggttagttatatcattgccacatgcagttctctctgctagacaaaaaaatatcttttgtgttcatttttttttctgatccagtgttttaaatggaggttctgatgttttcctacattataggcaggagttaccgccctaagcaagttcacccatgcgaaattcatttcaatctctaaatcctcaaagaaaagcactgccttccccgtgttcacagacagagattgtgttgaaaattctgcagtccaggtattcactcaggtcctctattattcctggaatggccactggatgtgcctttatgatgtgcactaaataaagtggttggagaatagttaagcagtcaaagtgtgaaactaaaaacagctaaaatattttatgctgaaaccccaccttctgggaacttagtactacacacttctgagaagtacatcatttcttagtagcctgctccaacagtccttgatattacaaagacagccagaggcaaatccagaaagacatcttgctccaatgttagggtgcctctaaaattaccttccaattgttccaggatccaatttcacaccagtattgaagaaaattataaaactctgttttcaatgaccaaaacattgaattctttcaaaggttccaaagatgtagaggttgtatagtactccaaacacaatacaaacacacacttgtagaggcttcaccaatgcttagcaaccaagatccagcaatttataatttggaaaaatcagaaaaaaactattctataaggggtgtcagcatagcatttagtaaatttttcctttagcagagcctagctaggtttacacatcactacaacacattgagtttgtaaatttgcccacaagaaaaatattaacatacataaaaagaggatgagaaaggattgtaggagccagagggatcaaggacaccacaagaaaacaactaactttggctcaaagagacttaacctacaacaagggagcctgcatatatataatatatatatatatatatatatatatattatatatattgtatagcttggtcctcttgtggaactcttaacagtgggaacagggactgtctccgactcttttactggccttcgggaccctactcctcatactgggtcagcttaatacatggggaggtgtttagtcttagtgcaacttaatatgtcatgttttgttgatacttagggaagacctgctctttcctaaacagaaatacaggggggtggggtgtggattgggaacaaaggggggatgggagacaggggctgggggaagacaaggaagaagaaactgcagccaggacgtaaaataaataaactaataaatgtatttttaaaaatgttaattctctcacaggttcatttaaacatggttatcagcaggtaattgagggtcttttctttggatcagtgtgaatatgtttgcagggagcttgtgcaatggagtctctctcctcatacagttcttttactgctagataaccaaggccttctcaatcccccaagaggaaacactgcatgcttttacccctgtgtttatctcagatatgacagaggaaagtaacagcatagacacccatgcttcatcaccacacctcaagaattcacattgcagcacatatgtagacttcaaaatcaacttgcttgaaaccaaaggacacaagtttactaacactagaatgatctagaacggatggcagattttaaactgcctatatatgatttgtctcatttggaaacactgtcaagatccacaaataagtcagagaactgcttatacaatgtgtgagaagtcacagttcacaccatttcaattttgttcaacgcattccatgtcaaactcttctaaaagttcttcagtgacaccagttccaaatctttcagtactaaggtcagtttcctggtcatcaggccatccatgacttacccctgaatgaaagttgccacttactgggtgactgtgacttcctgtatgtgaagttgcacctgtggctatggctgtccatccagccttgagttcactgcacagcactaatgatctgttgatgggatgcacatgaagcacaatcctcatgcgaagtttgccaagctgaccttgtccaatcttttcactgatgtttgaattctcttcttcttagttcaagtctacttgtttattttggatttgttcattttccttctatgatcttactaactctatcatctactttcaagtaatttgcaagctttacctcattccagatttaataagtactctccgttgtcagaaggaggaaatctgtcttctagtaaaggacactcaagacatcattgcctactcatctaggaggacactcaagacatcaatgctaactcttctggaagacatttgaaaaatggctatctactctggtaatgagggaattaccaacatggagtcaggtaaaaatataagggtatttattagggagataccttacttacagagtgacctagccagctggcagggcagcagtaaatacagcaagctgatgatgaaacggaagaagggagtttcacgtgtgtgcccctcactcttaaaccttagccagccccttgcaggtgtggttacactctcccctacactctggtgatgaggctacaatgatgacctccatactcaccaagaaggtgtctctcagcatcctggaagtcagaaactacagaaaacgaaggcctggttttgtaacggggtgacctttccttataaaaagctatccttttaaaagagaacctactgaggagacctgaaaatgctaatgtgaagacatttgttcctggaaatagtgaccaatgtattcggtctctttaataaactcagtagcactatggaatactgggttatacaacataacccaaacttcagagctatcctgagaaacctcctgctttccatttagaaaggagcatgtagcttaggctggaaggctgggtacagtgctcatgttgtaatagaattcacatgagtaaatttattatctattatctatctattatctatttatctttctatctctttcaccaaattgtctttctttaatcacctttctgagaaaagggttctataacaataatcatagaaaataaatggagacacctataaactgcaaagattaaatgaccaactatgtaatctatttagggaaaagtaatttaagtggtttccaatttaaatgtctatgagaatggctatgaataaacccttatctttttaaacaatgaaatactaaaagcaacaaaaaaaatcaatgcagtcccgatgtatgcatgcatattctaaacataattgtatgcaaaaaaagttgtggaaggatttatataataagctactctttatgttacctagatattttcaatgtcttgggtaataaacaccaagatcaatcataatagttaaaagaaaatgaaattaaaatgagaaatggagagggagatgcattcagaagaacttcaaagtgagtagcacacattcagacactcatatagcttttattttattcttttgtgtattgaaagacccacaatatagaaaacacattctacaaattttaaaagaagaatgaactaataatttctcagtcatatgccaagaaaaactcagctggattataatttagacactgaccatgttgaagtttaaatttgtttctcctgaaagatggcataaagcagtggttctcaacttggggattgagaatgaccctttcatgggggtcacatatcagatacactgcgtataagatatctatactatgacgcaaaacagtagcaaaactacagttatgaagtagcaatgaaataaatttatgactggggattcactacaacataagcaactatgttgaagggtctcagcattacgaaggttgagaaccactagcatatagctatcactgatacaggccaaaatattgtttccctccttctattccttgtagggtttgtctctgattttaaaaagttgtgatatgcaaccccagcattagacttatgaagttaatgcaaagtactttaatgataaaattacaatgttgggttgcctggtcatgggttttgtgtgtgaaggaagacacataactgagaattactagtcctggatgagtgactatcaggcccactgagattcaagcattacctcaaaatattttctctttcaaggaaggcactagatcctcattagagcacttcttcggcatctcctccaacttggctaacaacccctggctaacctgtatcctccagactactctcagaacagctagcctttatcagtctctgtacccaaatccacacagcattagaagtaaccttgaatgtcatcatcttctagatctaaatacatttttcccagttccctcccaacattaccagaaacttccagtttgttattcctcagaatcactttcctcgtgatgagtctccaagagtcaagccagctgaaattcggggttcacaggcctggaatctcccccagtttgctaacagaataaatatacaggactccatcccacaggcataaatcagaatatcaataaatgcttaagccgtgggcccagagtgaaatgtctggccctctgctctcacgactgcctttctctacttaatagcctcttccttcttcacccagttccttcacattcttccttacagcttagtgctatctactttagtcttttgacaatctatctctgaccatctcagcatttctatactgttaccggggccccttatctgcttggtcccttaactgaagagaacacacaaagaagacaggacctggatttctctttcccagttaagtctttagtgtctgggattgtgtggcactggctcaatgcatagaaactgttaggtaaatgaatgaacacataagtttgagaggttcaaattcatcatcgtacactggctctccttttctacccaccgttggtgtatttatccacggtgagccttataaagcaggggtcacagggacagggatacaattaggtcaagtttaggttatgcttttcatgatggtttttgcaaggtacctcaccttccctggtttcttcttcctctagggatgcatcaacactaaactcatagaaaacacttgtaatggtgtgtaaacggaatgctttcattattacaccacagatacatataacttctgttatgatgctcttatacccaactctaagacatttgttttctaaacaattaaatttttatgaatactaaaacaaagatgggatattacatttaattttaaagatgcatagctaaggttagtaacaaagcttggccttctgtccaacttctttcctggtttttctgtgtttcattgtctcttatatcaacaaacttctgaactctctgtgatctaggctgttcacactataccctgactataattgtccttttatttccaagtgctttactctttccacatgagaaacaccttttcacttttagctgacatttgagatggtggtacatgcaaggtcccatcaacagtggccctgactttctaaaacactcaaccacatgcatttgtgtaatgttctgtcattttgatataattattctgtaatagcaggaagtaatcttaaaggctggggcatctctccagtgaccccccaaacagaagaatattagacagcaatttacttcaaacaatatgcaagaattagccaaagatacagtttactattttttattattttatttgaattacaaacaaaattgaattacatgacaatcccagtttaaatccatccttttgtgtgtgtgtgtgtgtgcatgccatcattgcaatcaaatgaatcttgatgctttatcataaataaatactgaatcagccctgtcttgaaatatcttacctttctcatttctaagatgtcttgtcatgatcaatactaggaggatacttacaatccatgcaaaaagtttcagttaggtaaacttggttggtatgttgtttcgtgtgagcacaaaattcctccttaatattgctacaagggggaagaagtagctggaggccccaaagcattgagagcatcaatatccttaaagtccttccccagtagtatctctgtaattaaagtattattagcatgccagcctaagcggtttatagacaccatctcccatgttttggtttccagagatgtagcctttattaatctccaagaaaactccagaagtataacactttttttcaagataaggtttctctgtattgctttggagcctgtcctggaccttgctccatagaccaggctggcttcaaactcgaagagatttgcctgcctctgcctcccgagtgctaggattaagccgtgtgccaccaatcctgggctagtgtaacactttttaaagttcaaaaagaatacagaactcactggcatcttttaccatctccttctgtctctcccttttaatcctatggcccaacttcacctcagtggccctgctattgatttaagtttgtttctcaagaaatacgaccaacttccaatgaagggtcattgcagctctgaaaagaattatagctaactatggtgcctaagtcctgtgatggcagcacttgggaggcttaaccaggaggacagccatgagtacaaggctggtctgggttacatagaatgagttccaaggtagccaggctgaacaaagagagactctgcctcaaaaaaaattgataaaaataagataaaataaacctaagcactgttgattaaggtggacattaattttccaaaaagtggaaaatatgtacactatcccccaatgaagaacagcatatacagacagaggcagagtttggagtgacatttccataaaacaaggaaggccacagattataaacaaacaccaaaaaacaaaacagggatcaaggtgtggaacaaatgttcactcaggcttcagaagaccttaacctaccaatacctggatgtcagatgtacacccaacatctatgaaatgacaattcttgttgctttagggaactgatgtgaccttcttctaagacagtctactggggccaagtgattacttcacatccccccccaaaatgaatacagtattatctgcaatcaaaaacaattagtttcacataagagaccttctaaaatccccttccctctgactggggtctctaacattctacaatgaacacaggtatgtagtgtgagctggagcaaagccttgtcattacaagccactggtagacaattttacattgctaaaacattgtttagtttttatattggtctacatagctattttattcctaaaaaaaggataaaacatgcccaataagcatgcactattttaatggacaacttaaacttacaataacatccacatccaatgacctgtcccacttagtaagccttcaacccaggaaaccaaattgccagccaatggctaattagccttcacagtgtctcattcttaaggaaagtcccggaacataccattccaggcaacagcaagtcatgaaatcaaggtgaccaatgaccaagctaaccttttagctaccggaagcagcttcacagactgtaccctgtgattttgactgaatcattatctcagatggtgaatcagtgaagtgggcagaaggatgggttggaattcagatcacagctccttctcaaggataagcatacatgtactataaaaaaaaaaaaaaaaaaaaaacacctccacaacaatcctctcacttgcatacaaagaggacttgtcagtccagtcccctctcatttgtatgaatttacatccatcaacttctatctggtccagcatctaattaacagcaatgtgcatctggcagatttttttttcaggaaccgagaacactgtctgcagtcaggtcacatgccaaaattagctggccctctctgcacaaatcgcagtcctgctcatggggacagtgttggagccggtgccactgcttcacattcaaatgatcctcttatctttatccccccttttctctttcttaataatatacagaaaatcctagatccaaataactgctcagctcagagctttctcataaatctgtcataaaggacgatgactccaaaagcaattgcaaagcaatatggaagataatattctactttgcaaacaaatttctgtctgttgaaatgggctagattactcaccagatttttctgtccctggccttaatggaactgtgacctcagggaataggaaaagtgaggaagtgagtggataatatagaagtaatcatttttgctgtgatttaaaagaatgcagtgtttccccaatagaacctctgcactgactgggagacagtaatggtctttatcttcaacaaatttgataagcataaattcaaatctcactttgagcaaaacagcctgaaagtttattaaccaccataatatcatctttctttgtttaaaaaccattatcattctcaaacatgttttttgctgttgtcaatcccccctttttatcttttctgtcaataatgcactcattggtagattttttgtaaatccaaggttataggttcatttgccacatggatgtgttcacacggcaatctcgaaatcacagacttagagcctgtcttagtcagggcttatattgctgtgatgagtcaccatgaccaaaaagcaaacgatggggaggaaagggtttatttggtttacacttccatattgctgtttatcatcaaaggaagtcaggacaggaactcaaacagcagggacctggaggcagaagctgatgcagaggccatggaagggtactgcttacaggcttgctcatcctgctttgttacagagcccaggaccaccagctcagggatggtgccacttataataggctgagccctccgccatcaatcactaattaagaaaatgccttacagctggatcttatggagacattttctcagttgagattcccccctttcagacaactctggcttgtgtcaagttgacataaaactagccagcatactctctagataagatgctgagtgttggcagagtcaagtcagatagtcattgtgcagtcaatattggaggaccaactaaaggaagccctcctcacagactggttggggtgcaaacttcaaaaccaagacctgtacaggaatttgtttgctcaagcctgctgttcttgtcttcagatcccatgacccttgagtctaaaggctttataacccataggcaaacctttgaaaagatggtgcaaatgcaaaccctaaacataaagttactaggaaataatataaaatgggctgtagccagtgaaccaagtgaagtttgtaagcatgaaagaggaggagccagaagttcaaagcatctcttaccaccaagcatatgatcatggcaaatattaaaaacagactctttcaaatatgttgctttacttcatttataagtgcttatgttaaaaaagacagtgtcccaactaaatatcttatgctagctagtaaaacctgcagtgctagaaatgggttatatttcattgagtcattggtaaaaagggcaccataactgcacacacacacacacacacacacacacacacacacacacaccatagcctatggttactctccacaacctactaaggtcctattgctaaagatccaatatatttatgtcatttaacaatacagtcatgccatttttcacagcatcaaaaagtaactaatatatagctacccatcaaaattttgaaggcaagaccctatggcagaagacaccacacactttggacacaggatgtagagaaatcaagctagtactgaccagggtgattcctctcttttacagtattttacagtatttactatgcagggtgttgcaggaaattttcatcaagtctttccaagacgtgaaacctttctactataaagaccagcatggcaagatatgctacaggtgcaatagtggcgtgagtgttatgagaataacccataacattttctgcttgggaaaacccatgcctggtactgtaaagttagccagtaatccatagcaagggatctcatgtcctccatgggtaaacttactatgattttgcttaagtattgatttctctctaaatttatatctatagatcagctcagctctcattagagattatttcttcatggactggactgcaggtttgttgaaactcacagctggccaaagtacaaagggttagtgcatttgggatgcttagccacaaatggagtatccatatcacctagatctcctaaaagttcagagaccactgtcgaagaacagccagaaagatttaagagtcagggcttggggaattactggagcaaaacagtagcttcagacatgatgactccacacctttgagaacatgggcaacacaaattggacctggtaggttacaaaggaaggatgagaggagggaaggaaggaaggataagaaaagtaaaaaaagaaaaaagttgggtgagagttggagatagggagtggcctttagagggattcagtagaagagtggggagtgaatatgataaaaacacattttctgcattctcaaagaatgaaaatactatatatttttaaatattttaaaatgatattcagatactactggtaaatcaggcaatacgtctaccatgttgttcctaaactctctgaaagttgtcatcattttgtactctatgctttttcctcatataaaactaaatttgtataaactatggctaagtcaaacatttttaaagaatgtagtcatcattcttttgatattatggtgcctcatatatttcttgaagccaactatcaatgttatttatctaagcacaaagcacaaggattcagggaagactataccaacccacttattctacataaagtgtcagaattgaataacaggaaccaacaaataaaatggaggagaagcatctgtatctaggaagaggcaatgaatctattggaattgagaagaatcaagtaatagttaatgaagcaaagggggaagtagatttgcttttatattctgtatctgaatcataaagcaaagccacatccatgaagaagagaactgtcccttgacatattgtcctccaggtgcacccatgacaggattcattatttgggcctggtataggggagataaatactgtatgatctcatatacttgtctcatctcaaaagttgatccaaagaaacaaaacacaggatggtgagagtgtaagaagttgatcaagaagtacaaagtccaaggtagagtgagttctgatgtctgtgataggtagggtgactgtagctaacagtaatagaatctgtatttaaagtagcttgaagaaataattcaaaggaaataatagcaaaggacactgctattcagacaaagcagtagaccacagaattggaaaagatgtgtaacaacaccacatctgatagagaactactatccaaaatataatatgaactcaagaaattaaatatcaaaaataatcttattgaaaaatgggatacagatctaaacagagaattctcaataagagcaaactcaaaaggcagagaaacacatgaaacattcaactttcttagtgatcagggtaaatgcaaattgaaactaccttgagagtctattttacacttgtcaggatgattaagatcaataacacaagtgacagctcttgccactgaggatgtggagcaaggagaacacacctccattgctggtgggagtgcaaacttgtacagccactgtgaaaatcaatatggtgatttctctccttgggaagtcaggaattgatctacctcaagaattagctatatcattcttgggcatacactcaaaggatactccatccaaccacaaggatatttgctcaaccatgttcagtgctgctttatttatgatactcagaaactggaaacaactcagttgttcctcaactgaagaatggataaatgtggcacatttgcacaatggagtaccactcagctctcaaaaatgttgtgatggaattttcaagcaaatggctggaactaggaaagaatcaaagtgagtaaggaaatccagacccagaaagagaaatgtggtatgtattcacttacaaatggatatcagtagccaggtattggtggtgcacacctttaatcccagcactcgggaggcagagtcaggcggatctctgtgagttcgaggccagcctggtctccagagtgagtgccacgataggctccaaagctacacagagaaaccctgtctcgaaaaaccaaaaaaaaaaaaatggatatcagcaattaagtaaatgataatcaacctacaatccatagacccagaaaggttaggtaaagaggaggagtcttggaaggacacatggatctacctgggagggagaaatagaatagatggtaggagcagactgggggtgtgtgaggacaggagcaggaggttgggtggggaggagatatagggtagagggagagaatgtgaggagagacagttggaattaagaggcttttgatggatgatatgaaagtctagtgcagtggaaacttcccaaaatatatggaggtgattcttatgaggttttataataagaggagaaatggagtctcaactgcccatctcttgtcaccaaataaagtttttagtagtgggactggattgcattcaattgaattgttgccctagggggtcccatggaaattccccaaacacccaggctgttgctaagacaatgagttgctctctgaaaactgatagttgggctccattgctgaggatagcacccacacaactcactgaacatgaaaaggtcaaactggtacctacatggagccttcacccctaccttctagtgttttggggaaggaaggtactctgaaagccaccaaaagaagaaatgtaaacaccaacccagccacaaaaatctttgacctacaatctgtctgcctacaaatatgcaaggacaatggtggtacagactttgcagtagtagttaacaaatatctgatttgatttaaggcccactccatgagatggactccttacctgggactactagggtaaccaagaaccagagactagataacccagagacctaggataaaaccaaacacctctggtctaaaaaaaaaaaaaagtatgaaaaacagtatcaataaaatgactccttttgatattcttctacagtcataatctgtgccttattcagtcattttcagggaaacatcctctagcagcagatgagaacacatacatggagagatagtctaaatgggatgtctccatcaaatccctttccttggagctcagggaaccccaaggaagaggaagcagaaagagtgtaagagacagagggattgaaggacaccaggataacaaggccctctgaatcaactaagcaaggtgcttataaaccatagagaatggaacatcaagcatagaggcctacgcagatctggcccaggtcctttgcaatctattatagcttagtaattttatgagaacaaatgggtctctgattcctgtgtctactcttgggactcttccttctgttgggttactgtgtccaacttcaatatgatggttttgctttattatatttcattttgtcatgtttggttgtttaaaaagaagacagagttccgaatgttcttgtcacaggaaatgacagaagcctgaggtaatcaatatgctaattactctgacttaatcattataccctgatacaacagaaacacatttccaaaatgcacatctatcacataaatatgtacaattttgtgtcccttaaaaataaatattttttaacttaggaaaaagctacttgtggggaaaaggaaatttttgtccagaagccactgaaacattgacaaaacaatttaaaatgtgtcttaaactgacttaatatacctcacactaaatctatataaaattaaagcaacataatttgaacccatgcatttctggaaattcatgataaatcagtgctttgtttatttgaaaatacaaacaaatgtatatccattccatgatttttttgacctaatggctaattataaatattgtgggtacttccccatagctcttattgtattcacttcttaaaattttaaccttgggctcatgtttccatccaagattttaagatgtagccacacaataagcagaacagtttgttatgctcagaatataggctgatgagagggccacacaggtggtgtgtcttgaatctcaagaaatggtgacaaaattgtttctgagtaaaaggctcgtgcatctaatccaggatcacttccaccttcttcaaaaacgcctgagatgtgttactggcttccttttagagttctgcttggtagtttatattcactaattcttctttagaagacttagcaatttagggcctttgaggtctgattttacaatatccttcacactcgtgtttgatggttctcacccaaggcagaggcatttgcttaagaatggagcttctaataggagaagcaaaccgcctccaggtgtcaaacatctgacctgttacaataaatctttccgctaaaagctgcctgagccccaccaccacgtgtgagctttacgccagctgtccacccgagttaggcccaaatgaatacacagaaacttgtattagtttcaaagctgcttggccaatgactaggattctcatctgttagctcggtcttaactatcatcaacctatatattttataagacttatctaatcggacgccttatcggcgtccctccttgccggtggatcacattgtgcagctggagcaggagcagaggggaaaagagtcgcttcctgtttctccttctttaaatatgattctccttgctatgtcacttcctgcctggatcaccacttctctactacatttcccagaatcctctttcactcctagtcctgcctaacttgccgtttcattggccaaacagtattttattcaacaatcaataagataaatatacatagtacattccccatcactgaccagttggtgtattctctaccgaaagagggagaacagctctgttttgaaaagtagcattgtgatttccatattgttggtttctcactgcttcatccctgttgtgtggatggtacccacacaccttgcattccaatgtgctcaattaataaaagtaccatgcaaatcttactctgcttcctaatcttccctaccctatagaagtttttcacttttcaattaaaatgagtgcttatgtgggtttaaaaacctatctttctcaacttagaatccagtttgctattgccttgtctcagggcacatcaattacacagctcaggggataagcaccaggcacaaaaatgcccccccccatgttgtcactagccacattccatcacacacacccccaagagattactatcacatcaaggatcttagctaatataccaatgattggctggagaataataaaaatgatcctctactctccatctgagggtttctggaaatgggctaccatgtgtggtacagacctgctttgtcctgtgtggttttaccttaattacaaagccaagaaactgaagtggaccataaaaatgtggctataacaaaagctgtagtgtttgatttggaaacagaatcatgttatggcatgaatcacgaagccagtccacctgagttcagattttgaatgtcacatcctaccacatgtcccttggcttaagagactttggctgttgcataaatacaaagaatggggtgacttttatcaaccacctgtaaaagatgcacaaaagcaagaatttgggggtcacctgttgctccatcctagccttaagaagagtgtgtgatatgcacttagtaggattcctttaccatacaaagaaggaagagtgaatagttctattggggaaataaatagctgctcgttatcattttgtcattgtaagttataagatcattttgatctaatcgctccttctcagatataagacctcaggataattattcctaatttttgcttgaagacttcagaaaaacactgtgagataaaaggcaatgccctagcctgaaacagcagttccattctaacacaattatccaattttggacattttctttaccattttgataattcataaacagagaagatggtattatacatatcataagtttcttattaatgacacagagtactaattaacatatgaaagtattaatacaccaaaaggtgatactattgtcaccaagatcagaaaaaaatctattagatatttaactattaggcattgtattggataatacagttgggaataaaagaacaataaagacccatttaaatttaaagtagtaaagtaactaaaaggtgacactcctatgagctaaccgtggaagagccaatttttgagtaagacagtcatacatgatctcttattggctgtctcaggttctgtgttgacatgtctttgcaatcaggtcagacagtgtattaatatttctgtgtaagtgaactaaattttttctaaaagaagatttaatagagctattaatcatccttttatcaagacaacagattttattaattaaaacaatggaatttgaattaaaatatttcaggaaaacagtggaaagagaggacagtcaaaacatcagcttatgtgcattgcatacataatagatctatatggtggtctatactgttttttttaattttgtatatattaggattttcagaataaaaattcaaagatagataacaatattatctatcttcttcaattgccattttaattacaaagctatcatcacattatctagatgtccctgtgataatgcggagagtccatggaatgataagaagttaaaatgcattgaaaacttaaaaggttatgggtacaggaaaatagttggaagaaaaagagaccataataccttatcctaattttgccattatttgatggcattggctgattcctgccttatccttgtggctagtagaaaaatgttggttagattgtagcagcaatgggaattaagagagctctctctctctctctcatcagagagcatcagacatggtgcgctatctcggagggaggacagaggttgggctgttatcttgcatctactcatagccacgcccctgttgagactagactactcatttattgatgatgccaccatggcattgtcacagcgctggagaaactcttgagtgcaacttgccttcattgttactaatttctatgatttattcttcatgtgattcctctagactttttagagtctggactttacaacttgaaccaaaaagctgacacttgtttaatgacgctgtgttcatgacagaattgggggctaatgatttctctctggttattttcaaatatatttgaaaaataaaaacttgtcatttttaatttacagaccaatagaagaaagtatgcaaagagatcaaagaaattacaaaatcatacagagttcacagtaaggccccttcattctgcagcaacagaaccaagactcagctaggagagatgaactttaagatcacgcactgatcaatgctgccatgcataggatgacacactgtctgctcccagctatgccttgctctaccacatttgtcaagtctacagatggggccccaggaggctgtgctttgcattcatatagataactaaaccaatgccagacagttttcctctgtttctcaccaagctctctttacagaacacttctcattatagaatttttaaagatttattttcaggaataattatcgaaccagttatccaggcaaaagatgcatccacagtcatcagttgctcagaactaaatgcccacaaagagtcggagatgctcacatcaagctgcccttaagagcagccaggaagattgtaataccagagaatattaaagataaatgctgcttccttggcagcttcccacacagcccagaaagataacactctacctggctaagacaaactccaacagggcagcacatatatactgctttctaaaaatatagggctaaaacctactactcattagaattcaatctactactcagtaaaaatcctttccatttaacattgttgtctgtctctatgactacaggtacacttctgaacataataggtaaaaagtcataattgaaattaaatgcattttcttctgataaactgacttagagctaatgtttctaattgagttacatttgtagctatgaaagttcaggtagcacataggcctataggtaatgactgcttataaattagtcccaaatttttaaaataaaaataacaatcactccaagaatcaagcttaatgaacatgagtctgggaatccctagtattatttcattggggtttctaaagaggatagaggatggttaattcattaaggcaagtgaacaagctgaaaaatggtaaaggtatctttagagccattcttggaaggcaagaaaccttggtgatgcaaaagctgatgttaattgtattcattttaccatctgcaaaactcctgagggaccaaatggctattatctacataatacatggctctttttttccttatttttttattagttcaatttagaaacaagcttgcttcacatatcaatcccttctccctttccttcccctccccccaagcccctacctgcccccatcccatccaccctccactccccaggcagggtagggccctttgacagtggctcccaaagtccaccacatcatcctgggccgggcctaggccctcccccatgtgtccaagccaagagtgcatcccttcacgtgggatgggctctcaaagtcccttcttacaccaggggaaaatactaatccactactaggggtcccctagagttcagaggcctcctaattaacatccatgttcagggctctagatcagtcctgtgctggcctcccagacagcagtctggggtccatgtgctcccccttgttcaggccagctgattttgtgggtttcaccagcctggtaccgacccctttgatcttcattcctccctctctgcaactaggttccagagttcagttcagtgtatatctgtgggtgtctgcctctgcttccatcagccactggatgagggctctaggatggcataaaaagtagtcatcagtctcattataggggaagggcatttaggttatcctctccaccattgcctagatagtcagttcgtgtcatccttgtagatctctggaaaactccccagtgccagatctctcctcggacctataatggctccctctgatatggtatctctcatcctgctctccgctattcttcccccaactcaacatttctgctcctccatttcctcctctcccctcctcttctcctcctctcattctgtcagctccctctcccctacccccatgttcccaattagctcaggagttcctgccccttcccattccctggggtccatgcatttttttccttagagtctttcttgtttcctagttgctttggtgaagagaattgtaggctggtaatactttgctctactgaatccaaaaaattattactcaggagtcaagatataaagagatgcccagtgaagaaaaattatacatgtgactacttccaggtttccaccagctggcctaccatcacttcctggtacaggagtagaattgttaggctcacatcttccctattctagtcaaggaatcaatccacctgccaacaatttagtgttctgcttttttttccaagtccaattgagacattataggttccattagttagtcattgttctattcttagcatgaatattttttatgttgaattatcctaattaaccttaaagtcactgtcatgtggtaatagaggcttgaagatattaacttagccaagttagtatagggcaaaaccagaacacacactggatcttcgtttcctgcctgtacagtaactgctttcgatgctatattgtttaaggtttgccttgaatggcttccctgaaacaaaggctggaaattgttaaagaaattccattcatcttttaaataaagaaaaaaatagaattgaaatgtgtactctagaaaaccacagcatgatgaaacactccaaaaaaaaaaaagtcagctgacaaaaactacaggcaactaaggactgctgagaagaggaggaatagtcttctctaggctgaggctctaattggtatccaatgccaaatgggcagccttgaaattataaatatacaaataatactaaatggactgagaaagctgtatttatatgtttatatttaggtgtgtgtgtgtgtgtgtgtgtgtgtgtgtgtgtgtgtgtgtgtgtaagaaaaagagaccatgctttctagatggagcagtgtgggtacatgggaatggctgaagagaagaaagggaaaagggaaataatgtaattacattttaatttaaaatggttttgacttttaagcagtcagcataggttcttgagaccagagagaataagtaatattcacatcatctatcacactcagatcatttggagctactatgaagttgtaataacgatcactgtctttgctctgtggactaatttgatcttggtaaaggagccaatgtcatgttatgtatacaagatcaaaggttttcattcaatttaaatgtcttttgataggatagtttactgagttgcaaatgtataatgtgatggatagctctcagattcctcttaagaatcctaaataagtaacatagtaagaccgcttagactttcttatgtcaagctcccatcatttctccacatgccactgtattaacccttatggtttgaatcacacattaaatttcatgttaagcttcaagacctgttttacttactgaatttgtcctgagatgtccatatataatacatttgccagaaatagaagctcactagcctaaaggaataaagagtaagctcttaaaaactcattttctaagctgtctcattcttgctcatcaagtctcagcttaatttgaacttcctccagtaattcttcctgcccccaccctgcaatcctggcctggaggcccctagtacttgttcccactggtaccataacacaatcttctaggcttaagtgcttgatgacttaagttaccctctggtgcattcccatgtaagaataaactctaatcctgtcttaaagtccactgtgtccctaagcctagcatacagtaactgcacaaaaacatttatacaataaatgaatgataaaattgctaaatttgacatattaagttttgaaatctgttaattagtgccaacaaagaaaatcagtaagatttgaaaaagataggagctgtcttgtaataagatgatgaaacatctatgttctaaaagaaagagtgggtgggggaccaacaaagcctatatactatgataacaccagaaagcaagagccgggctctcacaaaacaaagccaaagcatgttaaaactcctgaacacccttgatatgtctattcaccattgttagggcatatcatttccaaatcaatatcgaaagggaacattcacaaataatataaggcacgtgcagtgatcctttgtctatgcccaattaaatgggatatcctcctggacatttctaccactaattggtcagggtacgatacacatgagctggggtgattaccttaacacatctgcctcccggtggtgtcagagagaaagcaagagtcattagaagaagggtggctaatttgtttgcttatctcagggcccaaccagttaaggattataaatcctcttggagtttaatgtgaggctcagagctaaactggggcaaggaaatgcttttaaaaccttcagccctgggaggcaaggtggtaaggatcccagagacaagaaaataaaagaatatttatacctaacagtatgaaagcagtgtgtctcattaaataaaccatcttttagcatcctgaggaattactgacccataatgacagaaaagtctacaattaagcttagttactgtgaatcaccaaagacacagaagacatccctttcctttataagtgaataatcccatggatgatcatacctattcatctgggggaaaagacagttcttttccagaaaggaaacaaaataatgatacagtcttgtttcactagaatctgttggtttttaacaatgtagacctacagataaaaagacaatcctagtgttagcaaaaccaggccaggtgatgggtcagaaaaaggaatgcacaaaaggaaataagctaacaagggacaaacaacaggagaattaatttgtcatttatctcaagtcagaccaacaggcaaacatgcaacttcagaacctccaatgtgagtgacccttggtccctggaacaggccatttgcctgtcataaagaagttttcctatatcaaattgcatcatgatatggttttgctgagttctgtcttcctactaagagatccccagactccaaaaaaggttataagcaaggattatttcttgattatatttttacagttttctcatatctgtgttataggttggattgatgttcatgtcatttctcttcatgcaacaatgttctctttaacttgattacattcaacatctcttttatcttggattctgaaagtttcccacacactggtctagctaaacaggtagaaaagaagactttagagattttggcatgtgaaaattaccaagctatatcccttgtagagttgtatcttaagccatttatcaagccttgtcatattgggagcagggaaagttgcatcacagtctagaagggacacaaacaaacaatcctgtgtcctcctttgcccacaccattttctatgtaggtggcttgaagtccatcatttaatgatttatttatgtatgtattttatgtatatccatctgcacaacaggagaggtcttggatcccttgggactaaagttatagacagttgtgagttgccatgtgggttcagggaattgaactgagaacctctggaaagaacagccagcattattgaatgctgagccatctctccagtcccaaagatcatcatttaacttgagatgtttcgctgactatggaaatagaaatatatacaaatactggatactggatacaatactattgtgataagtgctatggaacacatgaaagaaaaacatttgtttgtccacaaaaggggataggtatcacgttcaacacaaaggcataactgagtttccacttcagctgaaattgaataaaatgaggcaaagtccattagaaaaccttctcaaagtttgagacatagaaaaagatatttataaatgtaggtcctgtaagcatccccaaatagtactacgctccaaaggttgtattcattaaagacaagctattacttgaaaaaagagcatcccaggtacctactgctgcttcctgtgaagacgtgagagatgaacttagagatgattaggaatggcaacctagagtgtggagaaccatggctgagaaagagtgggaccatgcttaagcacctgaaatcctgcagatagctggagctttggggtgcaaatgtggggaaaggtcagccatggtgtggggaagaggaaatgaaataatgatatctaatctaaacacaatttaactagttttctgatagcatgacatggcagagtcattgtacctgctgcatctgtatattaaagagtcctccagttgctgttttaaaatatctcaagatagcatcctcctacttttttaaattaatggagctataggtcaagggcagaaaattttctctttagatattcacaatgttttatttttttcctggggtaggaggcatgagaatcataggagctcctccagtgggttccatgactttaatgcagattgccatctaatagaaaaatatggccacagcaaatccatactttcataaatgtaaaatgtcacagcaaattcaaatgattttttaaatgtgattccatcaattgaaagaaattgaatctttataaggcaaatgcgcctatttaattgactgcttcagagtgtcaggcagatggaggcatcaacgtctgtgtgatgaataggattaataagggatcttacagttttgctttgttgttttggaaccatttgattccagcaagaaaataaacaaacaatatgattctgaaaagtgtattcaacaccgtcccccaaatcctattttcttccttaagaaaatagttttaaaaaatatgaagacacttgcaatgattatcccaagctaaggacagagtttgcaaagacccagtattgtatgatcagcagcctgtcacacacaaacacttggggacagctcattcagtgacagctggccaacctggactatctgcttctattccagatgcttgggaccaaggcagaaatcttcagaactccatgagaagatttttaccattgcccctgctgtagacagggaaacaaatattagctggagttcaccaagttgcagttcactagcaaaaggcacatttgttgctgtaacatttcatgtgatattgtccttcctttttacttcttttgactagggtaaaattgtatatcataaaaagaagaggaaaatagtacagaattaaagctggagttttgctaatgtcaaccaatccctccagacttgttttctcatctaaatagatctaggctagctacaagcttgctaccccagccatccagtaagaggataaagccaaaaatgcttcataaactaaagagaataagggacgaggagtgagcaattccctcatgttgctaagttaccagtagaatttccctggagaagtgactacctcctttaggaatatatacaattcatgcattcatagctctttgtaaatgttgtaagtgttcagttactcttcaatattcacatgttgctttcggtattctcctaatatatttttcccctgtttcaaatgtttgaagccattggtcttccaactagccgtcttagtaccttcccggaggaaatctgccatatattcaagttcattaacagtcacacccttctgcatgatcattttaagagaatgctccattattaaatattccacagtgaccttaagatcagttctttcattggtaaagtgtgatgagctacccagtggtgcaatttcctctgattgtgagcacagttgtggaagctgatttgaacagcctgattgcttgtttcacagctgccaagtgtatccattagctctggggagctactgttaccctgaatctttggctgataaacaaagtgatcagaaaatcctctggtagccagccagatttccggtctgaacttcgatgtgagtcctagcaatctcaaggaagcttttatcccaagaacttacaggaaaaaatttccaccaatagatttttatttctgtcctgcaatgggaggaacaaagtgtcctacccaggacatggaaaggaacctgacttcagagaccacactgttatcttcatatcccatcttcacagcagggagtagaagggctagcacagagcaacacgctgttaaaaacgtcgaattaatggacttataataaattcaaagctctgttctgtgcagaggtcctataagttcataaattaagtctgagagaagaaacaaaacaaaaaaggagcaaagaagacaagaaaagaatatggccatcctatattctctgtaggagattccaaaataacttgcaaatgtatttaccatttttaggccatgatttaatccagagaatttaactattcagatcataggatttccatcaactttcacatactgtgcatcctggagtttctgctgaataccattcatcaaatcacatactgcctgcaacctaatcagaagagcaatgtactcagagtagtccgagcaggaaggggctgcctcttcagcatcacataatacgtatagaaaggcctgtgtacttcaaattccattctatcattttattgattgagaatttcacaaacacacaaactgtgttttgagcaaacaatgggttgttttgtttgttttaaaaggtcttggaattgagctgtcctggaactcagtaggtagtgttaggtgggaattgaattcagagactcacttgccactgactcctgggtgctgggattaaaagtattcaccccacaaccagctcacattacagtttgatccaaccagcttactcttttctctgtctttgccaacttgctttctctttctttctgtttgaatggaaaaaaataattaaacgctaagtgctgtttgactttttattaccatgataattaatgggttaactagtcaatggtggcccacagtagccatttaatttgttctggtaataaagaacaatagtctaatatctatggtgatatccttgcctaaataaaggtttattttaacttcacatttgtaaacttaggtagtattcaccatgaaccataccttctaaacatgaagtgagatggccagcccagaattcattgttttatctttcaactctcaggatcctaggatgagggaaaattaaaacccaaaagagacttaatgataacaagttcatcttgctcattaatagaaccacgccatcacgatgctgcagagttagttaagtgtgtcactgctggccacaagtgagaaggggggttaccataccaggagtggaaaggcacacccacaacatcactggagatgttcactttgcctgtgggttttctcatcatttcacattacttcattgcttcctaccttctaatggatggatcaaaatttattgtatgcatgtataaaatactcaaagtattaatacgaatataatatataactacacatagttatatataaacagagtttaaaaggcttgatctgtaagtgcagcctgagagtcatactcaaaaattccttcaaaaaatctaaatgataactatgtatttaaaatataaagatgaaaacctggcggtggtggcacacacctttagtcagcactcaggaggcagaggcaggcggatctctgtgagtttgagaccagtctggtctacaagagctagttccaggaccgcctccaaagccacagagaaaccctgtctcgaaaaatcaaaataaataaataaacaataaataaaataaaacatcaagatgaggactataatagaagcacaattgtaacaaattctaaatgtggattccatttggtgttgtagcaccagtaaatactggtcacacattttaaaataaggatttcatttgttctaatggtagcttaaaagtgtcacatgttcttaggttgggatgctagggcactgttctaagagcactcaggatttcctcacagaaagggtataaatactctacatgtaggtttatgaagcctgtccatacatattttaaattatttccttttaccttgatgtagggaaacaattcttttttctagcaatgaagccattcttcatcacaggcattgtgtactttatgtatacaatatataatgacatcaaattttgagtagaaaatatggattgttgataattataccggtaagaaagatttctcttgccctaagatgccacaagtgcatatttattctattgcctcttagaagctatgaagtcatcctgttacatgttagataagtttatgactcttcggactactgccattattgctcctggaatgtgcaatgtaaccttcatcatttttgccttttgatattaaaagttttatataaatgtcaatattttacataaatagcaatatatacataaaaagcaatatttaagcagttttaatactataagtctactatctaattggtgttccttaacctgagaatactgaaagaaccctttcctctctctcccctataaactgtatttgattagcaccctgagaagacctcaaatttaattcagatgcggtgtcatgccaaaatgagcttaaccttgtatgactcagatattcataggctaataaatcaaggttgggtaatgcttaagaaacataagacatatttataaccttttcttatatatataaatgtttctggctttaatacagttgcatgtaatgatttcaatgatttattcttctgaaaaaaggtttttcttatccctgatcttcagtaacaaacaaatattctgcctttgtcacatataaaaatgaatctttatgatatacatagacaattagataaacaacagtaaatacactaaacaattagtaaaaacctgcaactgataaagagaaaataggcagtactcagaagacataggtgcagaaaagaaatttttaagaacttcatttgttcaggaattaaagtcaacagttgacaagtgattcctcataaaactaaaaagtccctggactgctaaggaaacagtcaaccaagtgaatggaaacccacagagtaggagagaatggaaacatctaatatgggattaatattcagcatatataaagaactcataaagaataaatgaagtggacaaatgacccaatttgaagtgggctatgactcttaacaggtagttctcaaaaagagaaacaaaaaacctaagaaacaccctgagtagtactcaactgcaattagggaaagacaaattaaaactactttgagatttgatctttctctcatcagaatagctaacatctaggaaacaaccaaaagcaaatgatggtcaccgtgtgaggaaaaggaaatcctcatgctctgttggtaggattatggacagattcagccattacagaaatcagtgtagagaattctcagaaagctaaaaaaaaaaaaaaaaaaaaaaagcctatcatatgaacctgatatactactccttgctatttaccctactgactaaacatcctacatcacagatatttgctcagccatgttcactgccactctactcacaaatgctaggaaatggaagcaacctaagccgtcttcaactgacgaatggatgaaatgaaactgtggtacgtatacacactgaaatgccactcaattgtaaagaaaaatggaataatgaaattggcaggtaaatgagtgtaactggaaaatagcgagcaacttaacccaggcctccaaagacaaacgccatgttttctcttatttgtggatcctagctctgaatttataggaataagtatataacctgaactaattgcagatatctgggaagtgaagggaccatggaatgttctgggggaagaagaaactcgacaggggatagtaggacacagatgctatgaaggggaaaatgggtggggatctccctgggtcaggggaacgttccagagaagggacagagaaggaataaaatgtactcactaaggatatttgaaacagctccaggaaaacattattttctgttgacttaaaaatacatatataatgtgtgtgcacgtatgtagtttgaatggagtcatgactttggagtgataatactgcctgctagagccatagactaacaaaaaccctggtgccaggcatgcccttcaagctgacagtaagcaaagtccaaaagacacacaaaacagaacagactactgctgaagcccttcattgcctcccagaactcaaaagtaagaaggtattgctaatcacaccacactctttagacatgggccaaatagaagtaggcctgacctagaagcctccaccctgagggctgtcactcacagtatcaaaagctgcttgcaacctaccaagggagaaaaacaatcagcagtcctagacagttataaaacctatggaccacaacactgaccaatgaagcaagatgtccctaagtgtacaatagtgacacttatatcttgaggctaaccaacctcatgtaattggattaaaggccttcacaataggtgaatgcatcacaggctctgtaaatccagccagctacccgtggctggtgaggccatgaaccctagaggaaaacctactgactgcctcttcttgaaattagtacgatttctacctgcattctaaatccttatccttatacccacaggtaagtgctcatctcaccccttatgaaggaccatcacagaaagctacactggccataatgaaaaaaatgactgtggagttcccaagcccagtctacaacacagctcctacccctcaggttcgggaacaacatggaagagtggatggaaatattttaagagccagaggcagtgaatgtctacaagaaaactcttctctggacaccattgcacatatgaactcatagtgtagagataataaacacaaaagctgtacaggctgaagccatagaaagcctaagcatagaggtgaatggtgagcctgaagttatacccttagctatggaatgattgataactggtaagataatgggaggcaaagagtttctgtaatggtggggctccagtagattgaacacatttcagtggatggccgtatgccaagaatatatagccagcagtaattggagtacatgggctttaaaaaacatgaggatacaaagtttggtaggtacgggatggtgggggagattttggaggagttgagggagaagcatgaatatgatcaaatatatgaaattctcaaaagaatgaataaaatatgcatatatggaaagtataaagataatttagtatgacatctaaatatttctagcaataaaatataatttatcaatatattataatatacattatgatataatatattaaaatataaagtataatatatatttatatatagttatattaatagatggtgaggagagggagaacattccacattccactgaattaaccaaaagaaactgaaaagaaatatacctttatttcagattaaggaagatcacacaagatagaattaaatattttaaaacccaccatggacagtttagaaaataatttctccttgtagctgatgcatgtgaaatctcttaataggattttaagtctacattattgtgttgataattattagcaaatggatatataactcaagtaattttatccaatatatatttatagcaagttttaaatgatgtattaaccttttcctttcctaactgatataataagtaagtgtttcatcttttccagttattgagactgaacatggaaatgcatttatactaacaacattgtctttcataagagggtttgaccttcgctgagaaggaatggatggatcaccaacttcctcgggcattactgggaccataattctttctccaaatgagatgtgcgcatataggtgtgaaactggccgtgcaatttatggtaaattctaattgtataatatataaagagaatggaaaatgtgaaaattttatttctactcacaaaagcaatgatactgagtttaaaagttgagtatatctacatttctgcataatatctcaattcaacttgaaagtattttccattttctcatgttaaccatgcaatttagtttttatctctgtccctgcagtgtatgtttgcagaataaaatttcagattcaaaagacaacaaaatttataggagaataatcatcttcagtaacaattatatcgctgctatgggctatgttttcctgtgttggtttacaaataagaaattctcccaaagtaacaaattcaaaaaaatgcaaaaactgataaatggtggacctgaacaattgactatggagctaccagatttcctctaccatgctgcactgaaataccatgataatgacattaagcacatctgtcctggctagtttttatcagcttgatgcaagccaaagtcatctgataggaacaaacttcaattgaaaaaaacaagccttcataaaattggcctgtaagtatgcccttgtcatgttttctttgttgatgattaatgacgaaggatacagcccacaatgggtagtaccatccctgggcaggtggttctggggaatataacaaaataaactgagcaagccaggaaggatatgtcagtaagcagtattcctctataacctctgtatcagttccttcctcctggctcttgcccccagtccctgccctaacttccctggatgatggactgactccaagctgtaaaatgaaacatgctcccctgcctccaccaagttgtttttggtcatggtgttttatcacagcagtagaactctaaccaagacaacggccatgcaagaacaagccctattaactaaagataattggtaacatatcactgtaacaaagctagactatatggacatttaaaaactgtgaagaaattaccctttagcttcagatgagtatttgtcaccactcaaagacaaacaactgagtcattttacaataaggaatcagctatatagaacatcacagttaggtttcttagggtaaacctaaggtagaatatgactgggcttaccaaactgcttgtattcaataactcagtgtctgatgtggaccttgcccaaaaccagctcaccatggagttctattactgatgatcaatcattcccactgcttttcatcatttctcagagacttcatgactttgaaatcttactctactcttgtttggactagtcttggtatattttgcaggcaaagtttatactgcatatagaaatttttctacatgtaagaaaaatattaaaaagaatgtgcataacttcatgagcttttcccagtgaacatagtggtgtaagcagcttccatgtgaacagcagtcagatcacaaaacaagacattcctgcattcctgctttcatcggctacttttacccatttgcaaatatgcaagagtcagaaaaaaatgtactattatctatcagagtattttcactcaacaatatgcctcacgattcatccgtgttgttcatgtaggtgtagtttatttttcttcctgctatatggtattaaactacacaaatgtatcacagtatatttataaattatattttgaattgagattattgtgtttgggtaggaccaaagtaaacacatcctttaccttggaaaccatttcaaccttatagtttaatatttgcatatgttattgatattcattctgtattagtaaatgaaaatatagaattgtacaatgatcaccaaaacacactaatgtaatttaacttgtgcattcctttttggaaatttatcaataatgaaattggagtttctatgtgcttaagcttaaagatgtcaatattaagataggacaacatatttaggtagcaaaactcagtactgcctctattttagacagtgtattcacaaaagtttgtcattatagatgaactaactggaaacaaggctgaatttctatttccttgttgttaaatccctttttccttttttaatttaaattaaaaacaagcttcttttacatgtcaatctcagttccctctccctctcctcctcccctgccccccccaatccccaatccccaatcccatctcctttctgcttcccagggaggatgaggccttccatgggggctcttcaaagtctgtcatgtcatttggagcaaggcctaggccctcccccatgtgtctaggccgagagagtatctctctgtgtagaatgggctctcaaagtccattcatgtactagggataaatactgatccactaccagaagccccatagcttaaccagacccccgaactaacatcccctttgacggggtctggaacagtcctgtcctgatttccctgctatcagtttggggtccatgagcaaccccttgttcaggtcggctgtttctgtgggtttctccagcctggtcttgaatctaagcaatagtggagaagctaccttaaatgctcttcccttataatgagattgatgactaccttaagttccatcctagagccttcatccagtagctgatggaagcagaagcagacacccacagttaagcactggaatccagttgtagagaggggggagggatgagaaaaggggtcaggaccatgctggagaaagccacagaaacagctgacctgagcaagtgggggcacatggaccccagtcataaaactggggaagcagcattggactgaactaagccttctgaatgtgggtgtcagttaggaggcctggacagtctatgggacctctgacagtggatccagtatttatccctagtgcataaatggactttggaagcccactccacatagagggatactctctcagcctagatacatggaggatggcctaggaccttctccaaatgatatgacagacttttaaagatcccccatggaagcctcaccctccctggggagtaggaaagggataagatagggggttagtcggggggggggggcaggaggagagggagagggaattgggattgacatgtaaaacaagcttgtttctaatttaaatttaaaaaaatccactggattacatacatttttttctttcctagttggagctgaattgttaaataaaaaaaaaatacctgctcagttgtaacttattgaataaaataagcttatattcattcacaagtcaaatgtgcctgccctcaaagatgtcatgtaacctggcaggaaagaaaccaactctccagtttgtagtactaatcttgcaggacatagcaagaggatacagaggttgcatgtcactcattgctacagaacatttcagtaactccagacatgtgctaggactttctattcattcccttgtatttacttgagtttattgtttgaactctggttctttgtgtatcaagttttagggaggggagtcaaggcagtccacaaacgcatttctgatggttcgcatgtgcacctacattctaagaaacacaactctaagtttctagcatcgaaatataggaagtgaccttagtttttcttcagtgcacagtaatctttttggctatttgcttcaggatggtttttttccttcttaaaaaaaaaagagaggctgataaagtatcattggtgattgatgttttttattcaagtcatgggcctttacagtccttaaagattacttacacaaggcacaagaagatgttacaaaggcataggacattttgtaagggctttgaatctttgcctatgttctaagaaaatatacatgcttgagaatttgtgtaatcaccagtcagacaataaagtagcccttctctcaagtgccaaatgaagaaagcaaaagcttaaatttgttttcatgcttgtcaatcatttcattggctaagggtagcaggtcatcttgttcctaggtaagtagtgacaaattcaggtggacagagctgggccaggatctcattaatcccttcctcctaagggtcacaggtctcatcagtggaacaaaattcatcaacagaggctgaaaaacagtacaatcagcatctggtgttatttgatgctgtcttacacagaaaataaaaactgttgaatctgaaaggtttgtttctgttgatctttgtctcttgaggtactgcatctttcttttacaacatgacatacacataaggcctctttagtaactgagagtctacctgagtgaacaggccctgaccttcagccacaaggatatttggaggatgcagatcccgactcagaattacttagaacttcctagtgaagctatgtaccttggccatatgtagggagggaagaatgcaaaaataaagagctgggattgctatcatactcagtgagaggatgtgactcacatgtagtaagaggaacaggaccaaaccaggtgtatataaatgcaatataaaataactgtcctcaccaaagagcatcttgcagcatatgccagtttagaattgccttttttttgcaatttatcacatacctcttttaatatttatactcttttacatggagattcttttctgctaaattattcatactccaatctttatagttgtagcttcatctctaacatcaaacatcaggatggccattgtacattcactcaatttccgcaacatctggcccaaaggtagaagggagacattaaaataatgtacactactattttgatgagcattttcaagactatagttttggtctttagaatgggggactatagaaactatggagatggcacagttagtaaagtgtttattcaacaaacataaggaactgagttcaatcctcaatactctatggtgctgcatcttgagactatcatcctagcctgcggaggcagacacagtaggatccctgtggcttgctggctggctagttttagtgaattggtgagtcctaggttcactgagataccgtgtttcaaataataataataataataataataataataataataataatgtagatagtgacaagatagaaaccaaagtgaggctctgacttctgcacatgtgcacatacacatgcacaaataagttcacacatacatatacaaacaaaaatgtttgctttacttagtaaaatacccccaaaattgcatactgtaaatggatattagacatgtggttatcaagtataaggaaatataattcagttttgctaaaagaccttaataaatatttcatattaatgttgttcaaattttaatatatttaaaactagttattttctaaattttatactattgtgtataatacttttaattcattctggttcatacaaatatgtattcatatatatgtgtatatatgtatatatatatgtatgtatatatatacatatataaaattattattcttggcactatgagatccatgtcatttctgacttactacatatttttctttgctttttaaaatccattttcctctctgtttctccttcctcttcatctgagactgacttacttggactacatctactgccatctgtgaaccacaccttctgccggcttccctaatgagatgcacaactggacactgagaaagaagagccaggtttggtatttttaactactcatctatagctgatgctagtttcagatcactcagtgaaaggtggcagctcctgtcaggtggccatgcctgataattgccctttccacatatcggagtggtctctttctgtttgtaccttctagccaaggtgttctgatttctcccagccactgctagtctttggctggccctatactcccctttattttcctaaatcttacagttttataaactttacatttccttactaggacaaacaaatctatttgaccagggaagtcccaataaaatgcttatatctacccagaaattcaaaacacatatagtcacaaagcatcttgaaccttaagtgaaggccaagcgttcctttctgtggttgagtttgtcctacactgacacatagtttatgtgttcttaattatgcagacagcatactaaagtcagtcccatttccatctctcaagttagagatttcaaaacacagcagcaagaaaaagccatccaaatcttctacaaactgaagcaggggaatagctcaggtggtaattacactgagtttcttttatcccaagactgatatactaactctggtctcttgaagcacaggcatataggtttatatgttatactttctggtagtagatttatgttcatagatactagaaagtttaaataactgggtaattctttacatccctgtaagtactggtccctgagataaatgttgaagttgcaaagcaaacaccatcatttaaaatgtattctctaggttctctattttagaaatgttgccaaagaagttatttctaaatcagtaacttcttttataatacaaatattcagaatatcactttctccaaaatactgtgacaaacagaattccttattttgactatgcagcttttagataaaatataatagaaaagatattgatttggcaaggattttcttctaaaataagccaacaagcctttaaaacaaaatcttacaagcatacatttcccattcacatggctgtcgtcatggagaccaatctctggcacatttgatggtgtaacctacacatctttctagcctgaaaaaaattcccttgttgtcatggaaactgccagtcactagcctttctattctttgatgctcccatagataccactgaaatttcagctgtgatttttcccactctctaatgatcttggggttatcagacaatgctagaaagaaaacaaaataaaatttctggcacccttcaactaaatgtagaatcattttcatccacaaaccctgaaataaatacagcactgggactaatttctttacagaaatcctagtgagccttaggttgttgagcactctaaagagtttaacaagaatcattatttcccatgtcacttaaaaagaatcaaatcataagttataaattctatagtatttttttaaaatatatcaaataaagaaaaaactgaattcaatggactctaaagtgtactccttctggaaaaatattacaaggaaatttcaaaatgctaagtccccagaggtaactcaatggagatgttacatcacatcccactttgtgcataaaaataaacctaccacttacaaaaggatgaatagaaaaaggatacaaaaattctggccacccaactttccatgtaatactggaagacctgtcaacaatgagcccacgcttccatgaagctactctctactttgccttaatcctggtattaccaatcatgacaacactcattcaaaagaaacaattatccctcatataaaataaaaatatgttagtcactacaatggcagtcacagatacctgttatttgtagattattctgagaggatctatgcataaaattatgaaacagtgatagattggctatgaacaattatataggaagaataaaattaatattgattttttgatttctggattcatgaagaaaggaacagaaaagttgttgggctattctgtaaaaccgagaacgtaaggaagacagaggtgttgagacaggagaatgcatgggagtaattctagaaaaagctagttctatattattcatacaatactgactttctaatataattggtagggaactatatattaacggttcagaaaattaacttgttttccagattattaataatgataatcccctatgaagttactgctttatgatattgttcatgacataccaaatcagttataatatacttggccaatagattagtccattgataaagctccaaaatgctaatttgtaggaacaattttaacattcccaaaccaaagaatacatgataaaatttttcaagaaaatgacaacattgcataaaactcagttagattcttactttattatgaggctgacttttagccacacataaatactgattcttattcttgccacatcagagtctataatcttccattagaaaagaacacacgctgagttacagtctgtgtcatggccaatgttcctgggtaccaccttctccatgatagcacctacagagctgatgacttgggcactctgtagggttattgagcataggataatgaggtaatctggagcctcttggaaaaaaactgaatactaacaaattagtaacctgtgagttttttatgcagagacaattaaacttaagtttgatcaatttgtatggcttagaacagcaatgttttctgcaaacaggtaagaaacttcaagagcctctggaaaccctgggttgaataacccagaacactaaccaactggtgggcaaacatgatggcttctagattcaaaatcctaagggtcaggaaaatgactgttttttcagaactgatatttaaacatgcagtagatgctgcctatgggctaaccttcaggaaaattgctgggatggacagagccacacatggctactgtgactggaccttaaatagctcatctttacttaaaccatgatatttgacatctggaaattgagcttatgaagaagtttaaagagcagaaatatagaaagccaagacttggaatctacatgaagagtattgatggcagtattttctcaaattaaatacttagtatttaccacttttagtataaaattatcatcttttgaaacattaatattccttgttttaattaagcattactttttatttgaatatgtacacttcaaactacacaagatgtgaaacgagtttatattcatccttagcaatgcatcttaactcagaattattaagaaacactctgcatggtgatctactttggccaggttttctctttagcttaactgacatctgaaataaaatatctctagagataaccagttttatcatcaaaaatgcatctccattaagttatatattcacttcaccatctggaaagagggaacctcaactgagcaaacaacccaatcagattggcctgaagacaagtctgtaggtcattttcttaattaatgactgatgtgggaggtcccagaccattgtgagtggtgacactactgagtaggtggtcctggtgtatataataaatcagaatgagcaaactatagagaataagccagtaatcagccttcctttatggcctctgtttcagttcctgcctccaagttcctgcctccaggtacttatcctgccctgatttgcctacatggtagactattactgggacatgtagcaaaataagcccttttctccctgaacccccccaaaaaaactatacatactcactagagcatagatgatgtatgatagatagatagatagatagatagatagatagatacacacagctgaatatatatagaaaacccctgcctctaaataaacacattttacacattatgttcacctgcttatttgctctattcaagcatacattgtgaatatatttccacaccaaaatgtatatgcatctcattctccaataacttttccattgccaaacaatattctttggacagctctggttctaaactttgaagggttctttgcctatcttcaaagaaaccaccatactcaaaggcttggtcatcttggatttctgcactacagacaagaaaatccaatcaacaactatcctatgtagttggagaaggaagagaagagtgagcactaatttctggggttgaggtgggaggacattaaagtggcttgccttcttgcttgccttttatgctttttatttttatggtcgcatatggaaacatatgttggcacaacattcataagaggaaaagaaacagagcattatttcatttttcaaaaacaaaaagtataaaatctggctatttaatcatttctgcctgaggatcaaataaagcttgtactatgaggaaaacagaatataaacatcttttaaaaaccaaaagaaaactttacaacacatatttccccataaagtttctgaaataaagctgacatagaatcttctgtattagctcagactcataattggagatgcacaaagtaaattcaaggacagcatgaaaaatcccttatacaatacaagtcatcaatgctaaggcagaaggtaacccatgctcttgtcatatatacctatttcagccttgagagttgttgataatatattaaagcctaaaaacacattttattggcctccaaattcttaacaggtctatagatatcaggcaagggagactttagtttcagagtgaagtcatttaaaactcaacaacaaaagagaatttttgtttttgatttccctaatgtgacttcagtgccccaggagagattacccaaacagtttggaggagtgtacattttgtagtcagagcccagggatcaacagtataagaaatcaaaatgaatcccggggacttacctaatgtgaacaggttggaccatgtgaaaagtatccattcccactgtaagacttacacaaaagcaacagctcttcacaggaaaaaaaaaaaaggtaaggcattatgtgatttaaggcacggggtgggcctaggccctatcccaaaggatacaatagactctgatgacaccctatggaagaccttgccatccagggggagcaaaaaggatatgtgatagacagggttttagttggggaggggtggtaggggaggaagggagggagaagggaactgggattgtcatgtaaaacaatcctgtttgtaattcaaataaaaaaaagttgagaaaaaaataaaattaagtaaaattttaaaaaatgagaggtaaaccacatgaggaaagaggcattttaattgctagcctgtagtgtctagagcaaacactgccatcccactagaggctaactctacttgaactctttttatatgtgtatttatatgtactttaggaagattctacagcaatagttttccacatcactttttcagagtctttagcagagatttcaagacagactagtactgactctccagtggttactagtaatcactcttatgctgatctataatgaaaagaagcatgcagaacaaagaaaactataatgtgtgcaatttgaagagaaaaagatcaccaaggtgtgcaggtgtttgaaaggattagaaggataaggaggcgaggccttattggaagaagtgtgtcattgtggagtggggttcaaggttgcaaaatcccatcctacgcccagttctccccttcctctctctctctctctctctctctctctctctctctctctctctctctctctctctcttttattctgtggatcagaatgtaggtctcatgtttctctagcaccaagcctattcatgccttttgccccttgccatgatgataatggactaagcttcatggtctcctttataagagctctattgctcatggtgcatcttcacaacattagaacagtgataggtagttacccctattctggagttattagccagtggggtcctatagacttgcaaacattacaagctatagacattgctcttggtcatccctcattaagaccctgttgctgtagacatcacacacttgagttattgaacatggaaaaataaagctggcattgacctaaacatttaattcctgatacctagcttttacagtgttggaagttgcaatgcaagttatcatttggctggacaaaatatgcccactggtgtagtggtggcataaatttcatgggagtaagaaaacacttttgattggattcaaggcctgctcctttagatggaaaccatgcattgaactattaacagggccaagaacctgtaagtggacagaccataggccctggaaaagagcctactgttattattctgctaaatgaacatcctcaaactaacgcctaatgacttatcactacatccatagattattatctctcaaccctcatcagagacgcttgctttttgcagtagaccgtgattaacatagatacccacaactggccacagtttagagaataaaacattgtagaatattcagccctaaatgggacctatacatcatacatcctccctacaaggctcgggggtcattgagaaagaggtgggaaaaagactgtacgagccaaaggcaatggctgactacaatgaaacagtgttttctgaatgatggtgcaattacatatataaatttgcaaaggttgtagccatgcacaagaccccaacaaactcaaaccagacagaatgctggaatagaaagggaaagtggtaaccaagttccacccctatgtggggaataattgacaatagatagctgccaggtgaggaggagtcagttttcctcaagggtgcagatcctggcaagtagaccacacttcaaaatataaccccaagcccaagagtatttaggaagtagaaatagaactcaaatatttttggtttcatattcattttgtttttaaaagaaagcatattactaggcagataaggagataggagtgaatcttagaagagttggggaggggaaggaatatgatcaaaataaattatataaaattacaaaaaaattaataaaactactatttttaaaaaataggagatgacctcatcaccatcattatctgaaactcaatacacagaaaataaaatattttgggcaaaacattagcaaactacacacacacacatacacacacacacacacacacacacacacacacacacacatatatatatatatataattacacatacatgcccatatgtgaatatggatatatacatatatatacatatataatatatataatgatatagataacaatatcaatagaaagaagtgtatttacagacagatcagtagataattctcactgaaacaaaagaaaactgatagcaaaaccataagatatccactaatttaaggaatttttttaaaaaattaaagaggagaggaataaaccactttgtgacatttatgcttccataaacaggaaattattgatgataaactcagcataacaagtaacactgtgattttccttatccaaatccacaaatttgatttgtagaatatgaacttgccctttttttgagggggtgttgtttttggatgcaggttttctctgtgtagcccagtctgttccagaacttgctgtgtagacaaggctaaccttgaactcatggatatccacctgcctctgcttcctgagtgctggcattaaaggcatgccccaccacgcctggcttgaagttaccttaataacatgtttctaaatttcagctttcatcatttgcagttttgtaacagatcactgtaaacatagaactcatattcctagttttctaaagacaagatgctcctttcttctaactaagaaataagttaacttattaactccttaaataagaagcagcatctctcatctggatatagtttacagctatatgatgctcgtgaagagatgatttagcagattcctactacagcttgactgtaagcttaccactctaggtcaccagatagaaattttctaggtatatcagttagttgtttccttatcttatcttcaaatccacattaaacaccgcactactataaaccagatagtaggcttagatttatagtaggcagaaatgaaaaaaaaaaaaaaaaccagattgatcgctgtattggacctttaagagcagataaaaggagatattaaatactaagctacacatgattgtttcttttcaattgtattgcatgaaatgctacaaaagagaaaaaagcacacagtgccaaaagacatgtcctattaagtgcagagaaaattacagtttgagcaaagattaaaagaagacaaggaattggctggaaacaagaaaagaaggaagagacaagggtattgagatacaaggctggggtatttattaggcagaatcaaggaaacagattatgaatttaaaaagcaaatgttctctataaccttaatgattacaaattaccctcatgcattactatcatcctcctaagaccagccttcccttgacaagaaaggggaaggaaaataagatgagtgcctctcatacagtaggtctctgtacatgcattacccggtttgatcctcccaacacacctgggataagagccatgtctagaagcagaaatcaagctcagatcctcatttccatggtgatgcttgaaacatctgtatgatctattccttacatcttgggaagaagtatcaggaagatatataaagcgagtctcataaaacattacattttttaaaaaacaattttcttattttaattaaagggtgatagtgtttactgttcaccaactcagactaaaatgacattaattttttttaatgtacagaaggaaggataaagatttactaagcagtattggaacttttcactgaagaatactatgaaggtgaaataaatccattttcaataagtttaatggattttccaattagaaaatcaaattttattattacactgaaacatttgaaatagctggtattatttaggcaaacaaaagtagtgtgtcttataagtcagcctaaaaattgtactcatagtgaatataaagcactcctgtgggtaataaaagaactttaaacttttctagatccttctcattactaaagggacaaggtgtaattatttaaatacttaaggaacatgtgaaaattccatacaaaggtattttcaaatggtgtgactttttcaacaaaaaggcatcaaataatgtagtctgataaagaggataacatgaaggcagaagccattgctacagaaaagagtggtttggatgtggacattaaagaaaaatgcagcagatgtgatgatcattaggaaccacaaatacaaggtcaacaagacttaagtgtcaactaaaagaagagtgagctaatgagcagcctaactccagaagttacagaggctgtagtgaactacaggatgtaactcaaagcaaatattgtaccacttaaaaaatcattagaactggtaatatacacaaaccaaccctggttagagtaggaattaagtgaatctactttaaagaaaaacaaaggaaacacaagtagaacggtaaaccaagacaccatcagatgagatggcccaaaccagtgtagacaggaactgaagttgggaagtctgtagaacaagactgacacatatgaagtagacaattaaagtttctcaaatatgccttggctcaggattagtttttgttcacctcggcctcttgacttgcaaagcattgtgcccctatcgctcattttctaaatttatttagaaataaataaatttatggaacgccataaatttaaagagaggataaaaatcaaacatgtatttcctagggaaaattatgtatttgcttctaattgggcagtaagatgaatgtgtcaaagacagctgggcagtattgagtcctgaagactgcaataagttggaagtaggagaatgagagaaggtgagttgactttttgatcttttgaagcttctgaagcactaagcaaaaggttaaagggtatgcacagaagtgaagcatgaggggactgccttctcagtgtgtacccacagacttggaacagcatactgaggtgagatgtattgtatgctgagaaaaccatagcagtttttattctcatgttgcagacagtatctgacctgagctggaaaaaaaaaaaatgaggactccaaacatacggaaaactctgatggtcgtagctcagaatatctgggaaagggtttggtaatgcttcaattgagggttgagtaccaaacagaagggtgaaaatacttgacagaaaagtgttgaacttctattgtaaatctgaacccttctaaattgtacaccgagccaaccatgtccacaagaaggagacttatcctgcagatgttgaatgtatggactgcacagttctgttcatgatcatgatctggaggctcttaatatcatttcattcccaacgccacacagcaactctatcactaatatggttctagtacagtgtcctggaataaacaaattccaaatggccttgggtgctgaacagttggcaacaatacagcacactccgatcattaagttccatggataccaacatgtgacagacatctcaacactgccatcaattctcttttctcacaatgagagagcatttgtactaaagaaaacaaacaggaatttataatccaggattgatgttcctataaagtactcaaagcagtccgcaggggtctgggccctgctttgtaattctgaaagttttctgtgcaggtacccataaacctttttctgacatcagacccactgattgccttaaacttttaaatacaggtagaaatgtaagatattagaaacagctactaaacaaaaaagaaatcaagacaccagagttcactgatcatgaggtttcttacagctgacaaatgaagaatgcatttcaatggatgtatcctcatataaaataattgattttcaacatataagaaatatgcctacattgtatatgtaaaataccttcataattttaaaagtaaaaaatcaggaaactaaatggtatacaataactacatagttatattagttattagtatatatgcagttattagttaatttatacttaactctagccataaaaacattttaaaagaatcattcattattgagataattttaaatttccaaatacttgtcattctccaaattttcacaaagtaaaacatgttgggtaaatattatgtatactttataaagacacaaagagatggcaaggctccaaaaataattttaaagctatttcggtgtatggatataggtcaggcctactttcagatttcttttgaagacccatcagttggaatttggtttgttggtaactgtcttagagtttctattgctgtgaagagacactatgaccacagctgctcttatataggaagacatttaatgaggtggcagcttacagtttcagaggtttagtccattgttatcatggcagagaatgtggcagtgttcaggtagacatggtgccggctacatcttgatcagaagacaacaagaagtggtcttaatatcacaccaagcaaagtttaagcatatatgcgatctcaaagcctgcctccacagtgacacactccctccaccaaggtcatacctactccaacaaagccacacctcccaatagtgtcgctgcctttgtggaccattttctttcaaaccaccacagtgcctaagctgtccttaaatatcttggcctttttaatgacacaggatctgattatgccactgtttttttcccactaatttgttataggttttctttaaaattaagaaatcattttaagagaaaaatcaaatttgtcctttgaaagaactcaagttaatatactctccctaaaaggttacagtgtcaacaaatccttcaactcctcccacttggcatcatgagctttgcctgagaaagccaaaataaagacagccatggagtaataactcacaattctaacagaactagaattggccaaaatgtatggtgttggcataacatagcttggatgtcatctagttttcaagggctgggcctgctatgccctctgaatcaaccatacacatacctctctgactgaagagctgtgctgccctagtgccagctgcatctctgccaagatgaagacctttcccagtggtctttctaccccctttccactcttttgcagagtccctaactagatccatcatctcaatgacccttcccacaaatgtgacagcatgttcctcacctgtatatccatcccttgaaagaacttggcacttaactataaggtgtcctataaaagtatctagcagtgtcagatatgaatgttttgtcttttgaaaacagatgtgagattctaaagattcttggaaaatgggaaattctaaggtctctttgtttggtttagtttctcaacagagaattcttataaacaaacatccccatgttgagttgccccatgatggcattcaatctagctcaatgttccaacagctacaggatttcactcacgaaacactggtaccaaagcaaaggatcaaatatcattagctatttaccttatgccttttctaaccataaacaagttaatgaacacttactctaagattctgaatagacagcaaaatgctgattgaagactttgacatcatcatcagaaactcttcagaggtacacaaaactgttggacaagctccgtgtctatttaaaatgacttgaagtttgtttgccattagtttctcatcaaagtgaaaaagaaaagtaaaattgtgtcaagtgtgtgaataaagggtgggtgtagccagcccctaagaaggcgtggctagaaagaaaatgggccacatctcctcgactgcactggatccaacttgctccatttcagctgacactccggccagaggtttgggtactgacttcaatcaagttgaggatttcaagcgagatcttcaatcaagtgaatcccatctaacatggactggatactaacattttctttctacaggaccccatatgactatcaacgtcccatttcaacaggaagtaacttggagaatgctacgccccctttccccattgttgtcacttaggatagtgtatatacctagttaggaatagcttatgactttagggtttagttatattttacctttatactgttaagttttaatcctcttttagactaaaaggggaattgtaggggaagctgtagccacgccttcttaggggctggctacaagagtacctgagggcttgtgagggcgtggtcagagtgagtagggggactgcgttttcggtttcggtttctctttgcttcttgctgtacagactaccaccggctggctggttcgctctgtaagtaaggcttttccctattaaatacccttatatttctacctgactccgtattggtaatttcttactataggtgggagagtgggattagcgggaatggaggagaaagagggacaggcttgaaacaaaggaaagaacaaataagagcccacattatttggacaaagtaaagctcgtgcgtggatcagtcctttcagcctcaggtagaggtaagaggctagtagcccgctgctttgcttttgctgatattcagcttgaaccccaatagcagtctctgggtctttcatttttcatgttacagaaatgtccctgtttcatctgtgatgagaatgtttacttcagagactaagggatgaactaatctgaatttgagcagccagaaactgtaaattccctctagacatgaatttggggctgtatgaggaataatgggaacaaattgtgagataacaatgtccaggaatattacctaggaaagataaatagaaaaaacatgagatgacaaatgagttaagagaatgagagtgctgctttaaagacacattagggaattatacttaataccaggatggataaaaaaaaatgagtccataagagggagttatgcagataggtgacaagcaattctgtcaactgagttcagttctgttaatgataatgtcccccactgacttgccccagttagtggaactactcaggaagggttaggaggtatggttttattggaggagatttgtcactgagggtgggctttgagatttcaaaagctcacataaaacatgtctctcttttccagctgccggaagatcaggatacaaagctgttgtgggaaatttgtacactggtcaaatatgtatttgttgtgattggtgtaaagaaaagatgaacatccaatagcaaggcaagaggtataggtgggatttctggggagagaaagggaaagcagtgtgtgcaggagatgccaggagacagggagaagaaacaggaggtgcaagatggaagaggtaacatgatagaatatagattaatataaatgggttcattaagtaataagagctagttaggaacaagcctaaactataggccaagctttcataattaataagaagactctgtgtcattatttgggtgctgactggcaggacagataaagactcattacataaaactctcagttatttctctggcaccatacctgcttgtatgctgccacatgataataatgaactaagcctctgaaactgtaagcaagtcatcaattaaaagttgccttggtcagggtgtctcttcacagcaacagaacagtgactaagacatgccttcaacagaatttaaggaaatcatgcataggctttctcagtgtggggaatagcatttatatttacaatatgggcagcaaaagagtcttatgccattaacaaaaactgacagagaatttgatagtaacaataatatagtgagggtaattaagtaaaagcactacatttagggctgagaaaatagtttagtcaataaaagcacaaggagtctgatccctcataattcacattcgaaaatgtcttaggcatggtggtacacacttatgatgccactcctgggaaggaagttcctttgttctcattggtgtcaccctatcctactttgaaagtcaaacaaatgagagaatctgagaaatgagatcgaatgttctcctctgccctccacatgcacaggcatctatggacatcagcacaaatacaaaagtacacacatgtaaactctcacacaaatgaatgtacataatcatacatacacaaaaacagcacattcacccatcaggatagagtcatggctttctaacaataaaatacatctccatgtagacaacaatcatttccatagcatcttttatatccctttatagtcaggacagcagagtctatctggaggatatggaccaaggtcaatagatttcgtttataaagcatatgctctctagtattattccaatatctactttaaaaaaaaactctaaatatagtcatacttctgagtccatacatttggttttcatcctaaagaaaagaatgtctccttgaaatcaaataaaactcttatgattcttggtgccctatggtctgtaaatattgcctatgataccatagtgacaacagagcactcatgggattagccacctttactgcctttgattctataccccatcacagcaacacacaggaggctctggttggatacactcttcccaaaacacacagaatgatgaacaatgctggcactcactctttgcccaacaaaatcaaaagagcatgaaaggaaatttcagatggaactacccaagttgcatgggagtgttgtaaactcccatggctcaagtattacaagaagagagagacttggggagctctgttttatttccatacagaaacctcacctaaggccatttagacattacaattggcacaaattgttttcaaatgtctcagtgaacctgattgatgagtataatacaatcttttccaaggcaaactcctactcaaatacatttggaatttcaatcatagcatgaactttcctaggcacttcatccagtgtagactgtcctgtgttaactcagcagccacatcctgagtactgagtctgtgttagtgtaagaactcctgtggtacccaatatggttccccaaatttttacactgaaatgttggtccccaggttggatgtccaggtggacagagaggactgtgcttaagttactgaagacatatcactcaaaaagattgatgacattctcaggagttagactctggcaaattctctcaagagcaacgtattacaactaaagtgagcatgatctctgaacccctcttacttctatcttaatatgccatcacttccatacatacttctaccattgtgatgtcatctgtcatggggaccttatctgaggctgaacacaaaagcctgcccatttttctatttcaaactacccaaactgtccactaaacaacctcacacccatatcaaatattccattgtagcaactgactaattacaagcattgataatctgatttctttggtccgtaataaggttgacatagcttcaatttaatttacctgttactgtattgtatttcaaagatttcttttttagacatttggatgtaagtaattaaattgtttaccatagctagaagattatcaagaattagcctttagagtaatagaaaaagcacaatattctcccacctctgtctttgtcagcctgaagcaaggaacagcttctaaaggttttcttcataggcaaagagcgcatgcactaattcttctgtatgtttatcacaataagttgggagctatgagtaatttaaatcaataaatcactttaaagaatataatcttgtgtccatcaatagtcaggcatggttaggagatggactcaggggaccctagccctcattgctgaactatttgctactgatggaattggtagaaaaaaaatagctcttagttgtgtacccattagtgaccccatcaggctctaatagatcattccaattcaatgtccacagagatagcccaagtgaaactaagtcagtcagaaaacaaaccaaaagtcctcttggaaaggcgctagtagggacaggggagggacttgataggaatggaagagagaattaagggagagtggggaaggcaatcagaataaattatataaatgcattaaatttccaaataacaaaattcatccaaaaatttttaaatttttaaaaaggtaaacaatattggcaatataatttaccttaattattctaaataaaccatatgaaccgttctaaaacttaagtctaatgtttgctagaagatgagggtgggaggcctgaagaaatagctcacaggtaagaccactggttactcttccaaaggacctgggttgctttcccttgtacctaaatggcagctgattgacaacgatctgtactccagttccaaaaaatgcaatgccctcttttggtacaccaacataacattcaggcaaaatacccatacacataaaggaaaataaaaggatcctttttttaaggttatagttttttagaaaaaaaaaagaaaataatgttcacaggcacattgtacaggggaaaacagagaagcaacctaagggcacaaagttagaagggcttaaactaagacaatgtacccacaagttgggatgcaaggaagtcacataaagccattgcctggaaaaccaatgaggaagaagtgtaggctatggttcacgttgctgcccagtgcaagactgtggacatgttcaaggcactaggagcaaagtggagaatccaaagacaaaccctgtgcttcccagagctagagcctaccgagaaataactacctagaaaacaagagctcatatggtcaacttgcagccaccctgtgctaaatatgtatccaaataaaaacctgagaacaggccttagaactcactctgcaaaactgagaacaattatcttagaataactacatgatgaaaatatcacatttgctcttcatacttttgttttctctttatattcaacaacattagttttttcttggatttggatatgaggtgaaaaacgaatcctagcctcagaggcagacagtcagttttgctgctctcagtgttgcgttcctttgaccaagttgctcaactcttctggtctgtttccttgggtgaaaacaccatgttggatattggctggttcttccacagcgatatgagcagtatcattgcccagggcttgtttgtcactattatgggagtaaagtataaaaataatcctggctttgggtttttctggggcttgaattgtggtaaatggaaatgcttttagcacatgagttgttaagtatttggttctctcacaggagaggcctggagagacagtttatcagctaagtacattatctgcttccaaggagcccagtatagattcccacctaccacatggtggctcacaaccctctgtgattatagtactgaagtatcctatacctttttctggcctctgtggaaactggacatacatgtagatcacagaaatacctgtggacaatacaacaatactcataaaatgaactttttaaaaaagaacagcagaatacattgattcttgacagtttacattgctggccttggggatgatcaggagaaatgtccttatttagcactcttagttttgaagtcttttctcaactgagtggtgaaagaataaaatgggaatatatataaaatccatgttgtttgttgagattaagagaagtatacttcctatattcaagttattttcacattttaagttttaatgttaatctcctcaaatgccaaaaattattttttaaatcactgcaaattttacaactaagactatgtcatagtttataattataagtaaaggattacaatttattgccaaaatattaatattcaccccaaggaatacaggatgtgatcatatgtttttagtacaaagacatttgctagttgtgactttcactatttcagaacacaaatgtttaaataggatttaaacatttataaacgttttataaacgttttataaacaaaacgtttataaaaggacactcaaagggatgcattctaatttccacccagtggagcatacattcatcaagagttggtgatgcagacctcgtccccattagagccctcccatggcatgaagatacagcttaatgcatccctcagccatcattagagaagcttctatttgcagtggttggtgattaacacagagtcccccaactggccaaagggcagagaggaagagcctgggggttgctcaaccttaaatggtccatctatatcacatcccctcctcccaaggctcctgatcatttcagaagacgaagtagaaaaacttccagaggaagtatatgaagacaaggaaacagtttcctttggacacatcaggatagctttacatggaacccacaatcattgtaacaacacacatgagcctgaggcaagctcaagggagatcaaatcctagcattaagaaggaagttggacacaaagtaccatcccaggagctaatggcaatttatagctactgagataaggagtaagcccctacactcttatagaaccacactctaatagaaacccatacagccaaccacactctaatagaaaccaatacagccaacaaaatatgagtagcacaaattagactccatgagtgaaaaaaataaaaaaggagacaaaattgggtgaatagggaaagagggtggacttgagaggagttgggggatggagtggatatgaccaaacgcactgtatgaaattctcaatgaactaataaaaatacacatttttaaaggaaaacaacaacaaaaaagaaatcagttgaggggcctgaatgggattgacataggccctctactgtatcctgcagtgtatagcttggtctttttttggatgcctaacagtgggagaagtggctgtctcagactcttttgcctgcttttgggacccttttcctcatactagattgcctcattcagccttaataagagcggaagtgcctagacttactgcaacttgatataccatgtttgaatgatatccatgggaggccagttctattctgcagagaaatggaggaggaggaggctgctggcggaggtggcatggggtgtaaaggatggactgagaggagaaaatagcagttgggatgttagataaataaataagtaagaaatcaatgatatagcctatatccacttctttcaaggaagaagtgtctcctttcatctgacataaccacacatgatatataaggaagatgagaagatggtcagagccaagaaggttggtgtagttggcaggttaagggatctggagggtctaagaggttgaccaggactcacttgagcagcccatggacaatatggaatagataagagacacaggtttcacaggcctcattgggcagaaaatgcattcatctgttgggattagtattttcagttaagtaaaagtaaacaggattatgtagttgggatgggattagattttcatccacaatacaaaaaaaaaaaaaaaaaaaacagaagaactgaacatgacagacaaagaaaaaaaaggcaaaatgtctgcttgcctttccaaagtcctataacaaaacaggtctacactcaaatatgacaatagcctcctgaataatggtggaatttggtcaatatggatgatttattaagctgaatcattttcaaacagaagcaaaaattgaaattctagaagttaacattgttaatactattccctcaaatcattcttttgagttaatgggggaagacagttctaaaaaactgtcatgtgtccagtgtggaagcagtaaaggaatgactggtcttcatgtcccaactgttctaactaacctgaaagaaaaaaaaataatgagcacccaaacaaatagtcaacagtgactttcccactctggggtcagcatgcaagtccctggcacattgctgcttacttaagtcaaaagaaattgaaatccaaaactattttacatatctgagtcattttttatgaagacaatttagtgcatagaaattggaaaaatggcataaagccttgctgcattaacagtttgtcttaaaaagctcaaaaaaaaaacagtctgaaattggagaaaaacttcttaaatgtgattgcttctagtgtttctatcacctgctctgacactctgcagatcagaggtgaggttttttttaacctttattttgaattcctccttaatcagcaatgttgaggctgatttgtaatgcatatagcaaacatctatgaatttctaccaggtgtttcaagaatttattgatggatattccaaagcctaaaaaaagtatcactttcccatctgacttctccccatgacactaaattgtacatttaacaaagttcctacttttaagaaacaaaagactaagtttatagtgaatcacttcactttaatgacattaaaagttgtgttccatgctaatgaaaataattatgttcaaccaaacttacaagagttgtaagtccctttttcctgctatcagtgaggcagggaggcctagccttagcacgaacttccactaatcttatcagtttaaaacatattttgcaaagaacaattgaatcacacaaccaggacacagtattgtgctaatgaaattcagccacccactcaagaaactttagtgagctgtctctacccttggaaaagtaatgaagataagatgataagaaacaatccctattgttggagttctcagatttaggtaagaaagactagtattgtttcatggatggagactctcattccaggtaaaccagtcagctaagactactaaggtgtggactttgaagaaacgttccagaaagagtattggcaaactgaactaacacatcccatggagcctgatatttgtctctataattaaagttttactgacatataagacaacagtttctggcagtaccaactgtagctgttttcaggctgagaaatatggctgttgcatggaactcaagattgacaacactgactctctggatcttcccaggaaaagtttgtcaactgctgatcaagacaaagaggtggctggggcctgagaggtagtttgttccttccaacttgggaagtatatgcctaggcaccaagtcaaaaggaaggggttatttctgggagttgtatgtggtaggaaaaatgttgctagaggaacaacaatggaccagaccacacagtgctttgatcttagacaattgaagacaattggttataacacaagaggcaccttctagctccagaacttgctttaggcaaatatgaaactattgtatcaacaaagttttcagatctatccaaagatccatggaaccttgtagacctgtgtgggacagagagcatgtgcttcttctgtctatggagagttaaaaacacacaagaatcacatgtaaattaaagtaactcatgggatttgtcagaaagattcagccttttagtagccagtaaggaattctccttttaaaatccttaaaataggttctaaaaattcctgatatacagaggaggaatgtgctattagagaaagaacatcagagttttagaataaaaaaatgtccaaatttttcttactaatgaaatacacatgaagttcagcaggttacatgcaaaatgaactgctcagagcctggggatcctctgcgctaaaagaagggctctaaagtatgtatcacaaggcaatcataaatattgcaaaaagattttaattctttagccccatgcctaacacaaagtagtggctcagtaaccttagttagtcactggctttttaagtgcctaccacataagaataataagcagatagttgataacttgttgttatattatcattttcactaggaaacaaatttagctaatagcaatgttaatcagatgtatttccacttaagcagcatacatgccatccaaaatgcctttatttccccttctaaaatctcattactcactaaaatccttgcaaatgtatatctaaaatcctgaatccccctcctcacctcatctccctcagcttgaccctctgtctatatcagacagacccagccatctcctggtagatgacactgttgagtatgtggtacctttagatgatgccacccatctgctatctacctccagcagtcatcattgaatagagaattgcttctgaatctgattcttctgtttctccagaaattagccccttttgtatttctgtggccttgcccaactattgtcgtgctcagcaactagaaaaatctttctagatagaaaccaaacactaccaaatgatgaggaatgtccttctgtgtgtgtttatcttagtggtagttgaataaagtactgttggccagtgaagaagcaagttagacaggactaggagtcaaggaggattctgggaaatgtagtaaagaagtgttgtgatccaggcaggaagtgacatagcagggagacacagaatataagcagggacaaacaggaaatcatcctctttctcttgctcttccttctgctctcttctctatggagcctccatgtgatcccaggaagaggacaccagcagaaggcgtcctcaataagataagccttataaaatatatagatttataataattaaaagctagcatattagaaatcctagtcaattggccagaagcattgtaaactaatataagactctgggtgttattctgggcacccaagtggctgtggggctcgggtagatggagtaaagacttatcattacaaccaagctctatacagttctcttcaatttattcagaaattctggttcactactgctccaagtcctatagtgctcttaactagatatatttttcacattcctgcattattctgtgactaacatccaaactgtggatgcctccaagtcatgaatcttgcctcacttgatgttgcaccctcaaaaccttctgtattttttgtctcatagtcgttatcactaaatatttgccaaggagtaattacctccttatctgtcttcatgggttgtccccttatttatttaaaaacaactgcattctaagtcaattagaattttgttattgcatgctctgtgttctgtagcatatgccaagacagaggcggacaagacgattgaggaggacaagaccaatcctccaggaactgggagtgggcattggggggtcaagaggtgagcataaagatcattagacattggtgtcaatcaggtggagacataaaccagctgcccacatgcttccagaactctcccaaaggtgtagttgcaaaattaacaggttgcaggcaattgttagattctcactgcctgtaaacaagatcttaccctgaaactaaaagcacatgtgtggatttttgttttcctttttttaacattgcacaaattgttgtgtgtattctttaagactctgagaagacaaaactaatcttaaaatcctttttttcccctatgagttcacaaagtcctgaaagaacaccttttatttttcacatgctgattctaattataattataacacaatgcatttgtaaatttttgtttcctggtggttctgttttttttttttcacagtgctgtgtgaaattatcaattctatttgtctttactccctgcaccagggatgcttcaaagaatggtaattaatatttggcagatgacaactaatacatattcaagatttaaaatgtattttaaagtatgtcagaagctaaaagtgaatctattcctcattgttccacatctcaatgcagaaatggccaaaggtaccagaacaaagacagaaatagataaaggctttccatcatctttttactgtaaagacttgactaatgaagagctccaaatctgtactctgttgtttaatccctctgcctagcatatcatttagctatagggaatacttaataaatatgtgttgaattgaaaaagaaagagatgaacaaagaacaaaatgaaaaagaaagcaacatggtgtcttgggaaatgtaatctacagaaaggcaaactaaacgttttgcctttgaaaaaagaagggaactgtgacataaatcagaaaaaaaaatccaagtgacccagaagactgacagctgacagctaagtttaatgggtaacttttcccaacttcagtcatttgttagtgcccaccttataaaataaagaaactatttgtaatgctttaccaagaaaaaattatagccttaatatacatgcacaataaaaaaaacaatggaaatctctgttgacagtggaaactatatccatgaacaaggcaaagactttttaagagacctggaacaatgcaatagcatgacagttttatttagcccccttgtcatgatgtctcctgtgtcacaacccctgtgggccttatcaagccacctcacctgggttagggcactttctttgagggtaaaagttatgcctagaaaaagaaaattacgatattgattaggaaccaaagattaaactctagattctggacttggagttcagggaccaggttcagaatgataatgaatattaaagtgaaggtagaaggaacatcccatccacactgatttaaaaaaaaaatgttgagtttattcactgagtgtgtcctgtttgcaaatgtgaatgagtgtgtatcttaaatatgtcaaactacctactggctttcctgttttatttgtacttctgagacctgaaaatcattcattcatatgcactgagcactgggaatgtacatcctcagtactccatacatttcatctcccaggattatgcgacagcttacatcactatactaagaagtaaatagattcttctagttgaaactaacttttccaagacaataaaatgtgtgtatactgtgaatggcattcatgtttatcaaatatcatacactatacatttcctacccagtacagtggagtcaggacttgctgaatgctatgggcaggtgcatccttcaaagcccaactgttggaaacttaatccaactgcaaaaggtataaaaggtgtggttggagagatttaagcctccagagaaccacaccctccccatattcttataaaaggactcaaaggattgtgtttattgtctcctactgcactgccaagtaaggaataagcttctcttcccctagaactcaaatgcaaccatagatgcaggcagacatggcctgaacctgctagtgttgtcaccctggactttgcagcttctaggactgtgacaaatatatttctgttctttacaaattatgcttctcagatactctcttctagcaacacataacagagtgaaacatggagcatctttgcctcctgtctggttcacattacatctgttgacattaatctaaaattggctcccaagcatgaccttttctcttgtaatattcacaaaactaaaacaaacagtaaccttttaactgtaccatgtaaaaatgaaattaaacttcatctactacacttgacttatggtagtgtcattcttcatgtgtttgtgaagctgccttcatagtcaggctgttgagtctgtggtctgtgaggctaaaagaaactaatgataataatgatgatgatgatgatgatgataatgacgatgatgatgatgatgatgatgatgatgatgataaagctctaccatcgagggcagaagccagcatctaagtgagaccatgaagataaaattttaatatgacagatcttatttttgctacatttaggccttattacaagagtcagtccatcatggcaataaaatgttgtaataatttgatgttacaaagcagacttgataccatagctctgttagcagcttacccatcgattacttccttattccctttcacaaagggaaaaagaaaagtgagatgagagataataaactggcttgaaaaaagtgaaattccattgtgatcatgaacagatacagctaaaagattgcttctgtctcaagctctctatgtggcagtcacattttctgatttaaaaaaaaaagatgtaacatataatagaagtattgactaataaagggctgggagagtttaaattgctactatcaggataattctaggtttcataagatatggtgtaacacagagaccttgtgttcaaagcttacaggagacatgagatattggctcacagattagtgataactcaagattcttatggttattatgagtagggtcagccactggcttatgcaatatactccatccttttaaaataagcaataaattaaaacccaaattgtgtaaaaatattgctttggagtgacagagaaagagaagtatgatgagaacagtgagcttcacttttcaggtcattgtaattacacaaataagaacctggaaggatgagtccctcatccctgggccaagaacatcatgtattattgagggaaaagatatcagcagggatgctcacagtaaggatcttgagacagagactgtcttagattatttctatgaggcacaagtgcagttacaatgccttcattacagataggcagaaatggaaatgagtccaagcagaagggaagtctatgaccattgaaacagagagtagataggcatgactgtaacccaaggaattctgaagctaggagataaagccgcagtgtctgtaccagtgtcagttgctttcctgatatcttgatttcttcctgtaatactaatttcagacttgtggagtctaaatatgaaagaatataatttctcctgtcttcatctacccagtttgcagttctttcttacattaacacagggaaatgacacagctgccaataagtttaactacagtataactgttattcaaacacattttcctattttatttagatctagtaaaaaatagccttcaagggctcttttagtcaaaagccataaatagaaacagtacaaaatatcaactcccgtgtatggtcatcaaattcttcatacagaaaatgaactaagttcagtttataaactctccagtccctactgagttttccccaccagcctcccagggtggtgtgaaagccttcttaagttttttatgtaaacagtctcagcagatttgtagtgtaagggttttaccaaacttaaagtcatattgaaaaaatctgaaggacatgtgaaaagtatttccaacaaaacttactttgaggaggaaataaagaatcgtagaaaacactgagttcctattattgcctgatatgttggggaaacacatttcaaaagtaattgtagggtattaaaatcaaggctttttattttaattgctgtctattagtagatagtaaggctgagaatttatcttaattttttcagcattgataattgacagaatggtcttgtgcattctgggaaagggctctgcactgaggtagactcccagatcttatattttttttcacaagtgaaaagaaaatatctggctacctttcctatagaatcaaaagtcatttgggactttttggtacttaatagaaattgtaatttaaaggagagactttaataagattaagaacaggtatttacaagagcagaagaaaagttaatttactagttcctcaaaaaggaacttatataagaaggaatttataaaaaaattatagaagttttaagattcgtaatcaagttaagaaatatttaaaattatgaatattttattattgataaactactttgaattagttgatggttttctaccatgtaagataactttttcctctatttttaaacctgaggataataaagtgaaaaagctcccatcaaataaacaaaaatggaaccttcacagggtctgtttgctttgattatagtagctactttggagagcatttttgcttctaacatagaccaaaggctttgtaaacaaacaaagagctcaatgtctgggacttcatgcagcatgacagtgatcatgggaatgtggggcttttacttaaattccttcctgtggcataagcaagcatatttttttttcagaaggaccaggaaaacaaattattgctcacatgttttaagagggagacatttcattaaatttttaaaaggcaccatattttctagtaacattttttgccaatttgtttatttgcaaattaataggcagtcgtttgctaaaggtgatagttgtaggcaagctgaaacagtccaacaattagttagttaatttgtttgggccataattctcttaactgttaactcttaactatgacaattaatagaagaactgaagaattaaagtgtctgaaataaaacttggtaaaaaagagaaatactaagaaacatttcttgaggggttctattctaatatcaatgagaatgtatataatactgttgaattgtacacttaaatgcataaaatgtatgttgtgttatattgtgtcatgataaagggttaaaatgcacatttaaatgagttggcaaagttgtcttaatgcagcttatttccttcccttaatatgtgagatcaatgatttattccatattaaggataactgtcttcttttctgggttgtgatacaatccttagggagatttcctacactcttatttaatctcctgttcttaattcaatgaaactgaataaattatttcaaatcaacttatcaatttttaatagtcaaccagcaatcattgtctaattgattataatttaattacatttaaacttttctactactttgtttgaccaaataattttcatggtttctgtattcaaaactccattaatattaactaacctcaatgttatcatgttcttcataagaagagaagaatggggacctgagacaatgtgtcaagtgtggtatggaaagtctcatatcattgtaaaaggaatggaagaaaatgagagaggctaaatgctagatagaaaatcacacttaacaactctgcagactgctgtctccctgaaaggtccacctactaaccaacaatggatttgttttctataagcttctccttcttttaagaaaatgttcgtagaaaatatgtaaatctccaaagaaagttctgtagtaaagggtagaacatgtcactctaatatatgccatattggtgtaggattattttgagctgagagtcaggaagtgctccctcctctacttgcataaaagcaggaaggtattcttccactctcacctgggaaggtgagaaaaccctctgtgaaggggacttcacagatcctcattagtccagagacagcccagaatccacatagccaacaggactaggcagcctttgtctcccatcattatccaacaatttaccacactatagatcaatgcactttttcttcctttgtagtgttatttacataaaatgtatgttctttatttagggcaccacacaagacagagttctcacttgttcttggaaatttcaatattttccaattttcctccaaagtcataaaggctaaacatgtgaagaaatttctttttctttcttatattttttcttttctttcttcttccttattaattaattttgctacagaaatctcagataggagcctgaaaaagtagagagaaaagtagaaaattatgttccttcaatgtgataacaagtgtcacacaagtggtagagtgattaccaacccatgaaaaagtatgaatatactaacacactcaaggtaaaaatacaaaaaaaagtgaccatgatgaagaaaataggacagatatctatacatctaatagctacagcaagaaatgccatctgcatgtattatttaggacaatggttttctcctttgacttgagggatgtttggttagagataactcagtcttcattcactgctgggctaggcgaaaataaaaaaacaattgattaccctttgtgcatatgccaaaaacatttattgaaacttggagatttaccaaatttaattggaaaactcctaacttctcatactttcaagataacataattcaatgtatttttatagtggtgtaaatctgaattcttccaagtaagcaaaaaaaaatccatgatcactgaaatttaaaaatgactccagataagatatatctggctggacttatgtaacaccattgcatttggtttcatagagctaacctctgaaaatcactaagctaatacttaacatacacatgatatttgatatttccaagtatctctgaatctttaagacaattctcttgaattgtcttaaagcatctgaagatgctttttttgctcagatttttagaataatttctaagcctttgcctcccttgtctcaccacacttatctgaaagataggtgacctttaagaatcccacagtcttgtatcacctcatcaatatacaatatctacagggcaaaacccactccctctaaacttcagcccacaacctgacaagtacattgcacaccaatcctctgcacaacttagcagtaagagttctgctcagtgtccagcaatttcacactgccgatttctcaaggcaaaaatcctacagtgactccatttctgctctgactaagttgccttgcttgccttaccattaaattcacttctcaggtctggggctgcaccttttgagagataactttaaactgaaacattctaagaaatggatgaagaggaaatatccactgaaggtctgaaaattcagaaatagaatttcatgttcaggaaccactctaaaaaaaaatcaggttttaccattttcgttttttgaggtttaccatttttgagattattttgttatgtgacttgcatgcagaagcatcaccccatctaaagaaggaagaaaactggcatttaccaaggaacactctaacaatagttttctcttgctattgtcttcatagcagtcttctagaactatagcctggcaccatgaaagcagtttgtttgttttccctcagtgtgttatgctcattagtaaaacttgtgggtaggaaacattgtgtgtattattctagaaattaaaacaagacaatgtagacactttaaaattatgtacaatgcaaagaaatttgaaaggacaactcaggatattgccatactggggaactggcagctttctctcaccagttaagaaagtctttctgccatttctggcagtttgcttctctctgcttcataacatagaaaagaggcatgctcccttgttttaattaattaatttttttcatttattttacatctaggctgcagtttcccctcctccttccctcccatcactgcctcccctctgtcccacccggccactcttcctccatttgtgttcagaaggaggtaggcttcccgtaggtgtcaacaaagtatggcatataaaattgaggtaggactaagctcctccctttgtattatggctggtaggttccccccaaaaaagctcaaacattaggaacaggccttgatcccactgctaggaatcccacaagtagatcaaacttcacagctgtcgcacatatgtagagggtctaggtgagtcccaggcaagctctctagttgccggtccagagtctgtgagctcctattagtccaagttagttgtttctacaagttcccatgtaatgaccttggacccctagctcttacaatccttcctccctctcctcaacaggattcccggagctctgcccaatgcttggttgtggatctctgcatttgtttccatcagttactggatgaagactctctgatgccaattaaggtagtcaccaatctaattacaggagatagccagttcaggaaccctctccacgattgttaggagccttagttggggtcatccttgtggattcctggtactaggtttctccctaacccaaaatgccacccatcaagacatctctttcattgttctcctccttaatcctgtccacaactcatgccacccaatccctcatgttcccactccccacctccatccctgccccagtttacccaggagatctcttctcttctatttccccttcctagggaaatgcatctgtccctctttgggccctccttattacctagcctctctggggctgtggattgtagtaggcctctcaagtgctggccagctggtggagactgccgagaggtatgttgttttgttttgttttgttttgtttttgactactttctgaacataacatcagtagtacagacattgagatcaacaattaataaatgggacctcctgaaactgagaagcttctgtaaggcaaaggacatagtcagcaatataaaatggcagcccacagaatgggagaagatcttcaccaaccccatatcccacagaggcctgatttccaaaatatacaaagaactcaagaagttagtcaccaaaacaccaaataattcagttaaaaagtggggtgcagagctaaatagagaattctcaatagaggaatttaaaatggctgaaaggcccttaagaaagtgttcaacatccttagccatcagggaaatgcaactcaaaacaactctgagataccatcttacaccagccagaatggctaaaatcaaaaacaccaatgacagtctatgctggagaggatgtggagaaagaggaacactcctccattgctggtggaagtacaaacttgtacagccattttggaaatcagtatggcagtttctcaggaaaatgggaatcagtctacctcaagatccagcagttcctctcttgggcatatacccaaagaatgcacatttatacaacaaggatatatgttcaactatgttcattagcagtattgtttctaagaggtatgttctcaatgaagctaaaaattttaaaacatcaaccaagacatggtgtgcttaactatttccaaatccggtatggctctgccttatccggaagggatgatgaaggggctgattgagatcagaccagctcaattgctagaccttgacaacagcatgcactgtttaacaatcttccaacatttcagggtccggttttggtttctcccttaagttcacattgtttaggttttcaagaatgccttaggggttccccaaaacgctgcaaagtcctaagttcctttataccatgttcagcaatatgttttgatttgtatttattcctgaattcatcagaaactgaactttggtgtcctatgacatgaaattttgtagtattttcctaacctaatttttaagactttaacacttctgtgacaatactgcaattaaattaatattgcaaatacatgtgaacaaagatacatattgaatatacatatgacctaagcaacatatgcagataaaacatatgtgttctactggcagtggtggtgcatgcctttaatcccagcacttgggaggcagaggcaggtggatctttgtgagtttgagaccagcctagtctacaagagctaattccaggacagcctccaaagacacagagaaaccctgtctcggcaaaaacaaaaacaaacaaacaaacaaacaaaaactatgttcttctctggcaaatcaaatagaaaaataaacagtcatcaagcaagttaaaaaggtggtaataaggcacaatcatgaggtatagagttaactgaaaatgttactcatagtgctagttcaccctgactccctcttgctcatagtgagttactttgcttttttatataatgctattttacagaggacctagaccctctggtcttctccatgactttatattttccaagcatgcctctctctcccattaccattttcttcatctatatagcattaatgctttcagcacaccacccctgatagtctttattttcaaacagcatttcactgtaatagatctttcaattacccaatcagttttcctagttttgttatatccataatagccaaatcaatcacagcctctacttcctgcactccctagcctactccatcctggctcctggccccatcactaaagagaccctgctgttgacaaggaatccagactgtccaatcagtgggcattcactttctccatcacctttcctttcctgaaagtctccctaaattgtctctaactctggtaactccctgaggttcctgccacagattcaattcatcaacataatgccattatcacaatttcttaccttggcaagtggaaaatctagacatcactcgcttgtcacctatggccgaagggcagcaccttggctaagggccaatattagagacatcaattcctgtgtgagttagtgaagacactgaaggctcaagttatttgcctgattctgttttaacctcaggacaaaccagggtaattgctttattaaagtctcttatttcatttgtcacttttaattatgtgcatgtgtctctgtgtttatgttctatatgtgtacaggcgtcagaggcattgtataccctggaactggtgttacaggtagaggttggttgcctgacatgggtgctggaaaacaaactgaagtcctgtggaatagatgcaagtgatcttaacaactgagccagctctccagccccttttgtaatattattaatagtagctactatacataaacacatgtatacatgcatacatacacacatacaagagaggaagagggggaagggaagatgatagccaacacaggttctatatagtttcattgatcaatttagagttttctaaatcttgttttggttggcatgctataaaaacaatgtatttaaaacttggtaagtaaatggttcaaaatattaaaaacagtaaaaggtacataagctaaaacttaagatcacaaaagcacaatttgatgccctgtttccactcagttatggtaaggaagtatttccagtagcaaattagtagtttttcatttgatattttttgtctgaaaataagcttgttggtaaggctgctaattacgtagttttgttgccttcattaacatggccttgatttgacctcatcatctacatcaagaagaaaaaaaaaagaaacatcttactgggacagaggtcaactgtgttttccactcctcttactcctgattctcacaagtcatccaagccctgcagtcaaaagatggatctggctacctgtgaataacatttctctcatctcccagctgaccatagttacaaatgactccactgctctgagttttagtttattcatctataatttggacaaccaaataaaacctactcagaatgacactgggtttatgtaagtcttgtaagaagtcatttaaagctctgagtatttagatatttaaaaattgaagtcattttcctcccttctttcctcctccctatttagatgtgaaacatctatgtctggctgtccttcactatgctctctcgctcacccttcatctaccatcacgtggtcccagaacatgccaggtagaagcaatataggaagaatgtcctgaagcaaagtactaaatggaggaccagatgatacctgaggcacatgcaaggttatttttactagtcagatgttttccccaggaagaagcaatgccagccttctatatcatgagtttcacaagctatgcagtaatacaatatgctgtgaattacctcactattcatatcagcacagggcggtgatattatcctttcagcccaatagtctgtctccattagtagatccaaaggcaccagttttaaagattccatattcttgcaaactgtttttcctctgtgtgtaatgggtcagttacaaacagagggcttaactgttacttatctctggttccttctgcatttgtttaattaacagcacttggtcttgataacatgaatgaagcttttgctttagttacggctgccactgcatcctatagtggtatttaataacttgaaatcataaactgttttgtatctgtaacccaaatcattctcactatgatggtaatcaccactgtttatcttctaaggaaagctaatttcacttattaatggcatattgaatactttaaaatgattaaaaactcatatttattacaatgacttgccattcatttcacatgaaggaaagtaattttcaaacccatctttgtagtttgcaatctgtctatatgtggagagatggcttgtgacatgaagccaaagaaagtggctccttttctgaaagtggctctccctttctgtgtagacaacaaatggcaactacaaatgtcaggcctgtttctactccatcctctcagtaaatctggaagctctgtctgtttgttggtactggagaccaaatccaggaccttctgcatgacaagaaagcactcaccactgaagtctgtccccataaccagtgggaagggatgattttatgaaagtcatataaagacaacaaagaaacataatggatagggttacctacttcattacattcatagtctgtaacttatgacactgtccatcggagttcttcaccataaacccaggagcagcaaagtgaaatgttgtatctcaggtcagcatctttgtttcggtatttgccttggttttcatagccctctaaagctctcatgttcatctttgtgttcctatggcatgcttcttgggcctttgttaactagctgcagaatgccttgagcccccaaagccaatcacctgcacggtgcttatcgtctgtgaattcatgaattcatctgtttattttcctataattctaaacaagtgctaggacttaagactccaaacatagcccagatatgcacatgtttgatgttgaagcccaatccaagatggccttctttaactacttattacacaggtggatttttgacccaaccatagctgctctaggccatggtgtcttcagccccaaatatctgtccttctaatttaaaggccttgttcaccttgaacattttctgaagtttactataaaaggacattctacaataaactaaaagtgccatccccaccccacctcacccccaaaaaagctgcatgatgaaatatatccccagaataagcatatttggggatgtatctttgggaggtgcttaggtcatgactgttaagccttcataaatagggtgacggtattacttaaaaagaacccaaagagacccttacattccccacagcagaaatactgttatctaggaaaaccccacctgtaacacgaataataaaaacccagagacaaatattggggtgcaagctgaagataagaaaagcaaatcagccaaaccactagaacattcttacctctaccaaggctcagaccaagcgagggcagtggcaattctgtcttgagtgactgcagactgcaatgctctccaccaaaccccagactgccctgagctcctgtcttatattcatctctagtgctgagattaaaggcaccagatctgtttctcttttagattgattcactctcatgtagcccagggtggccttgaactcacagagatccatctgcctctgtctcctgagtcctgggattaaaggtgtatgccacctctgcccaacctctatggctaactagttgttgttgttgttgttgttgttggtggtggtggtggtggtggtggtggtgtgtgtgtgtgtgtgtgtgtgtgtgtgtgtgtgtgtgtgtgtgtgtctaacaagtggattagctgttaactaggtatgtgacttagtgccttagctctgcattctgatctttagggaggctttatttgttagattacaaataaaatatcactccacctaccagctattaagtccagtttggcattctaacctgtagaaatgttaaaagtacccgttaataagccttccagcctgtggcattttgttatagtatcctaaacaattaaaatacagcctcatcctccttgacagacactataaggaaattaatctatttgctgattccctgaaggtttatgttttaagtgctattcattgccattaaggtctggtttaggcaatcacatataatctgctattttgaaaattgtctactattgtttctaaatgtaatatattccttgaggtaaatatctctttagttgtatttctagtcctttttttttcagggtagaattttctagactttgtaacaaaaccatactttcttgaaatcctgtttttaagaaaagtatgttgggtagttgtcttaacatttaagagtactgactgttttgccagaggaccagggctctattacaagcacccacatggtagctactaagcattgttaactatcagattctagaggatccgattccctcttctggccactgcatgcacatggtacacagacatggatacaggcaaaacatccatacacatcaaataaaaataaatatcaaaaaacattgtaaagtaaaggatactctacttcttgtcatgtttggcctatgcattttaagacaatctattggtctgccctcaattactactaatgtttctctatttgttctttcctacaagcagtgacaaagtaactacctattactacaattgctcatcatttatgggccaaggagaccaggagacatcagatatcctcagattactagaaaaattacaagaactctctttagagagtagctgtggttcaaaatttcaagttgaggattcatcttaagtttctactgttgagataaattccataaccaaaagcaacttggggagaaaagagtttatttcagcttgtaggtgccatgggccatgtcatgtcttcaagacagcatttcacagcactcctctctgtcttcctctgtcttcctctccatccctcttccataatgttgatgtgggttctctttattaacatagagttttccagtttagctaggtgatctggtcagcaaaccctgggtagtctctgttctctgttctctcttctccccaaccccactaccagcattacagatgcctgctgctgtgaccaagtttttcacggacactggagatcatgggtgctcgtgtcctcattctggcacagcgagcactttatccactgattaactggatatcccaagttccctcccattctatttttaaagttatgcaatctcttcccttatatcaagttagtctttcagaagactttcccacattcccttctcttgtgtcctttgaggcttctcgtggacagaattgtgttataaaaacaatggataaaaagcactcctttttcaaagtctactgagtagtagaggtcatttctacctgtacagttttcactctgaatctcatactccaaaaggtaaaggactcattgagtaatataacaatacccatagagacagaataatgatgacctcctagactctaatatctaccatctgggacatgttagtgtgcatggcagataggaattaaggttgaagatgaaacaagattgctaataatctggctttgcaataaggtctctagattatataggtggatctaacataatcttaactgtgagtggcagaaaagactgtgagggaagtgggaatagactcaactttcctacctgtaatacagaggtagcatgggctacaggatgtaggtgacttctgcaagctggagaagtcaagtcaataatttttccctagacaccacagagggaacgccgtcctgcttttctgtgcagtgaagccaagtcagacttctgaactacagaactccaatacatctgtgtagcactaacccaagtttatgctaatttcattgcaacagtgggaatacaagacaatgtcccacatttttaaatactaaaagcaaaaccttgaattcagaaacagtttgacaatttatttttgcatatcccacatcttcataacactttaattgacctccacaattaaaaggccaactattctctgccagttaaccaaacacaatgacccaattaaaacctaagccttgacagtatagtaacacatggattactctaaagtttaaaaaaaatctctctcaagaattcatcttgacttatggattatgacaaagtataagcataaaaaggaacatcagtcagtgaggggagatttactttaaacatatttcaactaataactaagaaaggaaagacagaattacatcgtcatgttgtagtccctgataacaagaagtggggagaggatagctcccatccaggaaatagcagacttcagctaggggtagatccagattctagctggtgttctttccctgggagctagtggctactctttaaaaataaatactctttaaagatctaaaatcatcaaaaagaaactagtgtttcatagcacacaaaagtgcttcaaattcagaattgggtatttacaaataatattttatttggcacagctgtggtgcccatgtactactagtatgtgtgttgtatttgtcctgtagcagcagaatggagcagcaacaggaggctccatggcattgcaaaatatgaaacatttgctgtctttgaaggaatgatttcctggctccttctctaagcaatgggcatcaattccagatacagaaaaaaaatgagaagcataggaacactcatgaaatattctcacaaatgaatcagatctaaactgattccagggccttacaacacagccaatttgtggggaataacagtggacagaatagcatgtgcaataccaatgtcaggacgcactccacagaggagaaggtggggaactccacagaagaagtttgcttctccaacaaaatcattttctagaggaaaaaaaatagaccaggagggaaaatctatagactaaagggataattacaatgtgtcaattccatttggattctgatagaaccccactaaaacactgaattatgaaggggtcggtaaaatgtgagagtaagatcatagctgagggtattgatgacttgctaatgtatttaaatcccatcttagatttgttcttccaagtctctagaacagtggttcccaatcttcctgatgccatgacactttggtacagttcttcatgttgtagtgacccccaacaaccataaaggtatttcactgctacttcataactgtaattttgctagtgttatgaatcaggatgtaaatatctattgtgcgggatatctaatatgtgacccctaaaggggttgaaacccacaggctgaaaacccctgcactggagtgttcagggttacgactcagtagcagagcacaggtttcacatgcacaagactctgagttgaatgccccacatccaaacaagtaaattaatattctctctctttcatataacatttagataaagtaacataatatctgagatttctttgcaaattttctggcagagagggaagaaatggagaagaggatattggctgaaattaagttataggattattatgaagtcttcctatatttttgaaatttcccatattttaaaaaaggcattatttcccaaaggccttgagtttcatgaagagagtaattttattatggcaattttcctcaaagcataaagaaaccaataaaaaaaataccaaaagcaaagagtgccctatactttgatattacttaagtttcctatttttgttccaaaaaagccaataaaattagcttcggcaaagatgcagaagggtgtttcagtgattgagatgtgctgtggatgtccaccatgctgaacttcctttcaaggcattttgcaaaccgcaagtccaacacaatcattagtttcatattacaacttagctgtattcatcaacattctaacttccaaagtattaaagaagcacctcctacataacaaggccccagtgcttctcctctctccagtgaataccaacacggagttaggagactgccccatgtgagggaggacatgacttccaaaggctctacatcaaggcatgtgtcattcacactcatccaggagcaggtactgtcatcttccttcctgctaagaagttgcaaaagcagtgaagagactgagtcaggctgaactccataagggtgaatatcaatgacaatggccagcgcctcccaccttcagtctctggcaagttttgatataattaagaggttgagatgtagacaagcttaaccatcctgtggctgggcactctatcttcctaagagcaacacatgtcagcagccaaagagacaatgaaaaagagtttccctgaatagtttaaaatagtgaagttaattagccatcaaattagtaagcagggtgttcccaataagaaatgaaagaaataaaaatgtatgcttcgaaaatgtactagaaaaatagaaacatagcattcattatgaatacttgcatataatggcacaatataggtcaaaaaacaatggtgagtagacaaggcaaatggcgaatgaaaatccactgcacagcacagttcccaagaaatgccaagaagacaatgacacagcatccgtttgtctttataatgataaaaatgtatactagaggtgagtctttaatttggatgagagaatgaatgctgattttaggaagggggaaaaataggaaatgggtgttttatctgtatctacaatattttgttattttaaagatatcaagaaaagataatttttttagtttttattgactgtatgttggaattatcacggtgcctcagcattttctctgtttgcatatgggaattatgttttcatttaaaaagtataatgaatgaatagtagagtcaaagagacttgtaaaagaattttcactgaatagtgttcccttaagaaaacagggcatctgggtgactcataaactcagtaagaaaggaagagataacaggtgagaaaaactatccatgggatgatttcttcaggttacacagctaacaactgacaagagtccagcctcagccagctcctttccaaagctaccacaatgtttactagagtacttgcagacttatggcccaagttgagacaacctgcttcagatcagaccttttgggcaaaattattattcaatatagctctcaatccaaaatatcactattatacagttcatttccatgaaatcccagtaaaagcaactttccagaagggggaaacacctaggcagttattagcatgaacgctttcccatttttggattactttgcggtattctagagagaaggttttaatgaatatgcagccctgacagagagttcctgtcttgtcatacatagattgtcatgtcaattctcaatcttagacatccatcttcagaacatccagaatggttctcactttattaaagcttaggcaatttctgacattctttaaacctattccaggaggtcagagaaagacacgaactgatgctttggtgacctttgaattattcataaaagcttccacaagcatacatttcactacatgacaactgtgaactcattcatcaatgttccagaataaataccttctaagtaagacctacccaagcatcagccctgcaatctccttctactaggcaagtccatgaggatgaaggaatcagagctagacggatcacaagaaaaagcaaatttgcaatataaatttaaatgcaaatgcaaaaagtaaatttaaaataatcccctctaccccacttctgtggagtaatttcatagttatctgtctcgtatttatttaaactattcttctatatccagaaagaaaataacaaaaataagataaaaacaaataaaacattttgtctctattttcctttcagacccaaagcctaggaaccaaaatctccctcacattaactaaaaactattgcttttatttttatgttgctaattgattaattcattcatggagcaaatatctgactgattactctgtggcaggctctgttcagggttctttgctatatcatttaataatataaaaatctgtactcaggggagctaacattccagctgtaataagcaaagaaagtcatttgatgggaagtaagaagacagacagttgtacatgcagtctgctgatgagagcctccacacagccagagccacagaatgattggtcttggtgttatttaacaacatttagcatctatctccatgattcaattaaaattaccattaggaagatgttattactttcttcctaactgacaaatccaagcaagcttttcttcctcttgatgtctatcaccatgtcaaggaagcttatgatcctgattttctaaccccacttttgaggaggcatgaactgtttaaccttgctccagtgggctctggctataaagatagattgtatcctctgtcagctgcttttcatatctcttttgtgtggattaaactcccagtgctattagacaaattgtccaggacctaccatggtgactgttccacttaagtttctgtttctgttataaacaccatcggaaaagcaatttataaaggaaagtgtttattttatcttacagtttgcagtccatcatgaaggaagccagagcaggagctcaagacaggaatccagaggcagaaactgaagcaaagaccatagaagctcactggcttgctctccatggttcactcagctttattttttatacattccaagtccgtctgccctgctcaaatactgcctacagggggctgggtcctctgaccccttgtatcaataattgatcaagaactcacctccacagacctgcatacagatgaatctgatggaggcaattctgcagttgagcttacctcattccagatgactctagcttatgacaagttgacaaaaactaactagcattgtgactaaaacttgtatgtgcttgacaaatgctaaaacgtttctttctttctttgtgtgtgtgtgtgtgtgtgtgtgtgtgtgtgtgtgtgtgtgttgccacagactccagaagaggatattggattccctagacctggaggtccaagcctggaggtccagccctaacctgggtgctgggaacagaactcgggtcttctaagaacagcaagtactgttaactgctgagtcatctgttaaactcctagaataagtttcttaaaaacaggtactctctagaatcctttcatttttgttcttccagccctcctttgcaaatgaaaatgataaagtcaacacatccagctggtctaaccaaatgagtataatggttcttttgctatttataaataattttaactactcaattgttttttttaatctcagtaaacaatgacaggagaaactgttctgacatattttagaattgaaaataaattaaaacttatcatccagggatattttccccaaaacttgtttgaaatactttcctcctaatatgtttgttgccctcaaagatgaaactaaaatttcattcactacgaggattactgtggggaaaagtgtattcattgttttgctaattattcaaaagtagcatttccaaaatgcttaaacaagatgcaccattgttattaaatggatttctcttcatccaaaaaagaaaaaaaaaaaagaacatactaacaagaaaatgcaactgtattcccaggcaacacaatgagcaaaaggcagtacacaaaagtcgacctgtcaagaaatggtttacttcagtgatggaccagcactgcaggagactcattccacttccaccaagacagccctttgtacaacaagaagaaaccattaagggcttaatggcactgtggtgatgcattagatgctgaaagagaaacagggatattctgtttgcccagttgccagtttctatcacaactaccacgactcaccatctgcatgattcctcaagtacttgacaaaggagtttttctaactttagccctgcctactcagcctttatttatttatttcaagacattgacaaatctagctgttgtgaaaacctgtcctttaggcatgccatagtgatactgtcttgccaccgtgatgtcagagaggcttagattacccatccacagagactcgaacaatgtcacaaaatcaggtctgttgatgttttcctgaaagagatctgagatggctcatgaggcataagaggtccctcacttccctaaggatatataagccagatgacaattgctaaagaggggcagtcttctttggccctgtagctacctataagtgtccatgcacctataaataacccaattaaattctttgccttaccaagctagacttggatggaatcatttctttcatctcttgtaggtaccatatctgggatggatagacagttgtttatatcttgagacataggaaataaaagaaagcaatacttgctttgggtaacaaaagctagaagtcacctactaggcccaaaatgaggatgtaagtgtcagaagcagagccaggtttgtacagactctctctaaatacacagcatctcaagcctaagccatggcaggcagaatacatttggtacccagctgaaatccacttgcctgctcaggagcattgctgtttcccagtgctccctgatctttctgcacactctcagttgcccacttatctgcataaggtgtgatactctgtgtttggcacctgctgataagggtaattatagcattagtggaagcaagtacgccattcaaggttgaaaaacaactctaattacaactactccatcattttactccctcaaactgttcttgtccctttaacacagagcttactcagagattaaattaaatctacatctatttgaaaacaagcctttaaatagttatgggactagagaaaatcacctctttaaattaataatgcatgcatgctgaggtattagatatttgcaacactaggctgcacttcctagattacattttgaatgcttttcatgtatttctgtgcaaatacaaaatcaacaggaagagcaaacacactacttcaaagaaaaatgcagtctagatcttatagaatgaccatgaagttcttgaattatctttatgcctatagaccaccttaatagaaatactatctaaagagctaatattaagaaacttaattcgatactccaaatgcaaacacataatctcacactagtcaataataaaataaaattggaataaagtttatctgcctccattttaaacagtttctagattttaaaaaaaatctaagactttatctcagaggaaataatttccaaaggatgcatattattaaatattacttcactatatcagaattatatgagttaggtatttgaatatcaaaggatcatggatttatacacatgctgaaaaccatgaagctgaaacataaggagagaaaggaagatttcttaaatgatataggaatcaaagagatcgccatgttaggcatgctcactgttgtggcccagaatctcaaagcatggtcatgaaatgccaccatgaagactcagaacagctgcccctttctccagcttttgcagagccagtacttctgcctggcactggaataaaagattctagatagctgtggttaaggatggatggggcatacctggcttattctggcatattctcttacccctggcttcccatactccataagcactttctcattacaaatgaatctgccagaaatgtaacccttacttcaattgctagtatcatggctgtgcaggcactcaacttctgagaaaaaaattcttacaaattcagtggtaaatcaataggaaatctaactaaaatcaatttaagcaaatctcccttaacttcacacacaaaatactgtaacttgggtcataaagaaaagtttcttttgttagcttagaacagtggttctcaacctgtgggtcatgatccctttgaggaagtcacatatcagatatttacattgtgagtcataccagtagcaaaattacagttatgaagtagcagtgaaataattttatgtttgggggtcacacaacatgaggaactgtattaaagggtcacagtataaggaaggttgagatcactgtcctagaatgtgacagaagtttccctgttggagcaaataattccatgtgcaggagctaatgcctgtatctcaaaagtaaaaatgaaaattaacactgcaacctttcttatttgggtggattagatgtccttacattcccctgaggaattttaaccagattggaataaagtatcaagatttactttaataaaatcactatatggtcatttcatggtctcagaagagcaaagaatgataatgaagccccatgtttaataattaaccaaattcttccacgtttatctagcctgttttcaaaagaaagagtaaaatgttcatatgatttattattaggctgaatgccacattgtttctgaatataacctacagtgtataagacccacagctgtgtcaaagaatatcttaattactcataagaacaacaaagagcaacactgttcaagttagctgtggtctataagctatttttcagagactaaaatatgacaaaagttgaaaacagcaccagatcacattaaattataagaaggcatcttaccttgaaaattaaaaacttttgtaaataaataccttgaaagcattatcatccccttgctccttcctgtgtttgcatgaatgtgtcatgtctcaattactaatgaagtcaaaagtctttaatcaagaactaatgagatcaaaccaggaatgaaacctaagattgaaaaacctaagaatgacaaaagctcattatctttgggggatttttaatctgataattaaaagcatagctaagagacttatttttggagtttagaacagaatcaatattgaacttgccatgcaatgtgagaaaaaaacacaggctttcaactgccttttaatgaattgctaatgtttcaattaacaagtaccacagagaaatactgcaccatcgcctgcccttagcaaacaggaggacatggttacttttccagatgtttctggttgtcatggtatcctagtatgcctcacacacaattttattcaaggcagtaacctccaaggcatttattctcgaaacagcattaaatgaagattttgtatggccctgataaatgctgttcacccacctgttgagcaaaatcaaagacacaatataagaagcctagtagaataatatatagatgttttctaaggaaattagcttaattcttagtttatgtaagtggtaagaggtcattaatcttttttacaaaatttattccataagtctgtcttcagattaaaattctgtttttaggacattttcaaatctgcatttctaaagggatatttctgtgcctgaaataaaattaattgcatgtatatggagtatacccatatttttaaaaacttgcccacaaagcatcaaacatttgattgaaattcccaaatttattattgttttctgccactagttctttgtacacaagaaaacaaagtaaaatagactaaaattgcactctgtagaaatgctgtttacacatgctacttttatgtgtgaattttatccttcagtgcaacccctgtgaactagaatgagctaactaatcatactagagtccatagtgtgaactatttaattaactctaattctcttcactatgtacaacctgcacaatacctctgaaaacataggaatacacatgctgatatttctaaggaagcttttcgagttaaaagccgtgtgtcctctttgcccatgagcaacaggaggccaatggaaccgtcttctggaacagagctctctccctctgacatgatggaaaacctaatatttaaatactagaaatgcaaacgcagcagaagttttcatcaactgtattctccacacacacacaacacagtgcctgtgttaatttcacatgagtgcttttatcgcactaatcagacactgaagaggcgctgacacatgggaaaactgctttctgaatgtcgtacatgttaaacaagaggcgtatgagcacctgggatatttttgctattctctacatgcaaatgacattctgcaaacaattaaacccacccattaaaacggtgggggtgggaggtggaaagaacaagtattaagagagtaaaattatgacatacccttcctattatacccccattcagctggtgttaagtgagttcgaatgtgggatacagacagatcagagtgatagtcttgagtcacacgatgtgggataactcacacactcccgttaattacaaaactcaaatgatctgaccgtcagcccctcgcctatccaacactcgtcccattccagcacagacagacagcagacaagtcaagagaccctgttctagctaaagagaggggattggtcccctatggggcccctcctcacaaggactttctttccctgtaagtggctccacaagttccccaggctccagcaccaggagggcaagttcagcaccacggacagggttcctggcatcaggagagaaaggatgctgaggctcagggctctagtcactcaccggtgtctgctgcgagggcagtcccgagcgcttggtggacccctgcttggaacttaaccttttccacgactcggcaaacctgccccggctggcgctgcggctgcgcctgcggctctccgcgctgtcctcgcgatcagaacagcctcgctccatctcgcccgcgtccctccacttcttgcccatgcttagcccgcgtggacgaactgggaggtggccctgctcccttggcagtgcaggctgcagccggcgctcagctctctactgcgccgccttcgcctggtcggctcccgccggagcccagcgctcggtacggccgcccgcaggctgcgcttgcgcccgcgattggctcaactggggctggggctgcgagcgccacctgcgccccagcccgcttccttatgcaccccaaattgctttccacccgcagctaccgccttctcgtggtgagggagaggggggtacccagcccacgcctggggctgtggacgcgctctgggagtttcttgaagtccctgcaccccgcccagtctcaaggcctttgagacccgggagcagaagcctaggtcatccactggtgggtgggtggagactccagttgaattagacaaagaagggaagcttggaactttgtccgccttcctttctcttctttttcatctcttcgcaacaactgtcttcaagaacccttgggagagtccagcttcatctgcctgtcaggtgctaggctgcttcctccctctgtcaggctagcctgctgggcctcagactaggctgcacattgaagttttctgaatagatttttcactcactcacacacacacacacacacacacacagagagagagagagagagagagagagagagagagagagagagagagagagaggcacacgaatacatgtatataactatataacacgttaaatgctgatatcccttgggagttcatataattagctcggctgtggcctgagaatcagaatactacaagctctactggggactggggtgtagctcaatggtagatgcttgctaatatgtgcaaggccccaggtttgatcaccagcttcctagaactgagggaaaaaagaaaagtccccagtcaattgattctcttctccatctacaattaagcccaagggtctgtactatggagcagtgctgagaattctgggaagacatgggattggtacgctttcaagggatttatttttctctctctgataggaacagatacagatttaccctttcagcactgaagaaagggtggccgtaggctgaggacagtgtgagatgggttcttcaatgtgtcacatgtttcttgtcatctcctccttatggtttaggtgttttcctctgctctctcatgagcctcgtgtcagttgtcttaatacgtgctgttgtcacgttcagtaatgccttaacacgatgacagagggccactgaggcatcacaaattaacagaatctgagatgctgccttcaattatcaaggaaagtagggagttaaaatagttccaggtgaaaagaatagcctggctgctcatcttttgcaacctcagaaagacacattttggtttcttaatctaacaagtggaaactaggagaaacatgtaacagggaaggaaagaggttggaaaatgcttcgggaacgtggtgctttgatcctggctgtgaaaaaggtcacaagtgaggtgacagtagccagtgtgctcttgcaggggccttagagtctgctagttagcagagatggcaggcagacctctaaggcctgtcccacagatgtgctccggtatttatagcttgtgagcctgtccatgtaaacaaaggggcttttcaaagcagcactctatgtctgcaaatcacatatccatattaaagaaaatgaaactctaaacaatgtttgtgacagccagtgccatttaatgagaaaaccacaggctccattttgcatttatttgttttctatctaggttcatggatttgaaattattaaggacattgcatgaacttgcaaatattcagacaatattcctcccacttatgaaaataaaacaaacatcgtgcatagtttacaaagtgcacaggtatgggagcaaagcaccaactgagaggtatgaaagccaagaaattcagaaatttttcctgagccacttcaaaagagacacaaggacatgatgccttaagaagtaaaaaccctggacactttgcaagcaagttccctcaattgacataaatgacaacatctctaaaagaagttgagggatgttcactaatgtatccaggctcagcatgcactcatctgacaaagtcccaagaccctggttcccccacatcagcccattaagaagaaaatagcccagctgtcataaatgactatatcagcacgtcaatgagcactccaagtaactgggaaggtttggtttttttttaatgtacttagaaaaatttaatgatgaatggtgattgcatatggcattattttagctgtttgctttgaaaaaatcagctttcaaatgtaacattatacaatgatctggaaaaacaaattttagatattattaataataatatttaggagctagggaaatggccgagtggttacgaacatgtattgctcttccagaagacatagttttagatcctagaacccgtgttaggcatcataactacctataactccaattccaagtccaactccaattctggcctcttcaggcacctgcacatacatggtgaccatatatgtactcaagcaatgcacattctcataaaataaatagtaactaattttcttttaattttgaaaggaactatcaagtatcaactgttctccacaattacaaagcctcctccaacctgaggctgacattgctattgaggagtctgtgcaacaagaacaaactcttttcaaaacccatttgctataggtcacatgggggtgcactttgttgcaagaaacttaatagaaaatatctttccttataaacccacaggcacactcagggactaacaagagtacataaaatgtgagaggggaggccttgtgacccacaggcacacccagggactgacaagagtatataaaatatgagaggggagggcaaacagagaaaatgataaaaattatcaggctatgcttgattcccaatataagagaatatgaaccatagttcagcagttttaataccctcagttttccacattttaacctctctgaaatcaggatgctttttatactagatgacatctcagattccttggaatacagtgtattgagtcacagcatcttgaagtgagacagatgctaagcatcctgaccctaaagatctgacaagctatcccgcaccctctgcctcaacacttagccttcaacatcaagggtgtctcttcccattagcacatcacttctttatttaaaagctttaagtttcagaatgcctatcattataaactaagctgaaatccctcttttctagtctttaattctggaatcacacttatttaacaaatgttcttttcctgtgagaattgccaagtatttgaagatcgcctatacgaatcccctataatttctcttctttgtaaacaatatttgcttccttctgtcacaccctctcacactctacagaacaaaggccgactcagcacactcacataagagggaaaggtaagaacggtgttaaatgaacttgcaacaactgctttgtgagcccgctggaagcttaatctatgactaggctctcagtgaagtgggattagtccgtgcccatgaagcaagagacaggatgcagaatttctgtttagtcatgattagatttccttcccagacctcagggctaagtctcacacaagccagacaagcatgagaggtgaagcaattacccctgtaactcaagcaagaaatccccaaagcccatgactattaatcaagaaaaggaacagtagggctatcctggtttatgtaaattggccatgtatatggttgagattctctgagagacagattctgaaaaattagcctccttcaaagagaaaacagtcttccctataccctgcaataatacctgcagaaaagccatccagtgagtagacacctacaaattctacaaattgttccagttaccttgttccaccttgattcccttcttttctctcaacctgggaagaactaagtccttcaatcataggctttttactctttaaatgacattacatttaagtatcctattaaaagcttacttttttccatggatgcactttgataaatttgcatgtatttagacatccttacaattatgttggttctctaaaattttaatttcaagatcataagataatagctcaagttatcagtgtaagaactatgaatgtaaataataatagaattagaaatactatagacagaattggagagacagaggagagatgattaaaaaaggggaaataaggaggttataagtaaaatgtcactttattctgaaataatgtataaaatagatgagtaatataatactcctattgaaattataaaagttatgtcgacaggaaatttgaagtgaacaaacattataagtgatattgaggatgcggagctagaagaatcaccacacactgctggatggaatatataatggagctgattttgggataccctgtgactcaggcatcctgcactaacttacattcacaagagatatattgcattctaagtcctggatgtaactgcaatagggagtaaaagaagacaggcacaaagaacacatagtgtggaattccatttacataggttgacattagacaaaaataatctaaattgttaaaagtcattatcatggcaaggggacataccatggagactggaaaaaaaattgagcagggctgttggggaaccaaagatgtgctgcttgccaatcaagatgatagcaacaagggcagattcattttggaaactgtttagaggtgcataatagtaaatattgtgccttttgtgtgctcatctcaataatagcacaccagaaaagcagaagaaagaagaaatgcttctctaatgtgttctctggtgatagtgtcatcatacataaattgttgtttgtattttatacagtctaatgagtatcaccatgcatttagtcctacatgacatttgaaatgctaaaataatttcatctattgtcttttcagggaaagataacagcctgcctgcctcctcagaagagaaaactgagtgaagtaacctgattttttgacattctcccaagtaatgtttacaagtgtgagccttgaacctgagacttttagccttcaacttcaagttctctttttgcctctcatatatatatatatatatatatatatatatatatatatatatatattacatgcaatggtttaatgtaagttatataacacatatttgtcatcaaataacaaaacatgttaacaccacaaaatagcaactacacattagagaaaaataagtcaaacaaaaaagcatatacttatacagaatatactcatttttcttcttcctacaatataaaaacatttagggaaagctctgaagtagtggagaaacatcctctgaggtttcaggaaaagagcacatttgtttggaaagctgccatagagggctccatctttagaaccctggggagctaagccaaggctttggcaggaagaggaaagcctctggaccaacctctgcctagctgctgctaaatctctgtccctagcttcctgttctgaatactagacactcaacagctgtagtctatagcttttggctcctccctgctgagttatatattttccatgtatcttctctattttatcccaagtacaattatttatataatttatatttgctacatatattcaatttaattaaatatcaaggaaaataattcaaagggggggtatagtttccatgaaaaccaaagaaatgctttgggaaggggaatacattcttgtcagttcattgtattttgatttttaagtttaaaatgttacatttgtttgagatatgtatgtgattatacacctgtgtgtgagtgtgtgtgtgtgtgtgtgtgtgtgtgtgtgtgtgtgtgtgtgtgtgtgcgtgtgagtctgtgtctgtgtctgtgtctgtctatatctgtgtctgtgtgtgaaggtcagaggacaagtttcaggggaggtgtattctctctttttaggatgtggaccctggacgtgaaactcaagtggtcaagcttggtgtgtaagtttccttgccagacaaccagtctcactttttttttttctcgagacagggtttctctgtgtagctttgtagcctaccctggctctcgctctggagaccaggttggcctcgaactcacagagatccgcctgcctctgcctcccgagtgctgggattaaaggctcacgccaccaacgcccggccagtctcactttttaaagaatgccttgatgtgaaataatgtgagcaagatgatcgaagacagaaggaagaggatcaagccaacaaagtggttgcattacaaagcgtaatccctcagaatcctatgtggttattatttagatgcctcttcattaaaaacaaacaagcaaaaaaatcctggagattgcaagttgtggtggtttgaatgagaattgctccataggctcctatatttgaattcgtagtcatcagggagtgacactatttgaaaggattacaaggattaagagctgtggccttgtaggaggaggtatatcactggagggggcgggagaggaggctttgaggtttgcaaaagcccatgccatcctccagcctctgcctgctgatcaaggtgtagctctcaactacgtctccagtaccatgcctaccatatctgttgtcatgcttcccaccataatggactaacctctataactgtgaggactaatgtctgaactgtaatcaagtccccaattaaatgctttctttaataagagatgacatggccatggtgtttcttcacagctataggacagtgactaagacagaagttcaacataacaggaatggtttatacaaaaagataaaacagaggcttaattactatgaaatgatcaaagaaaaagtctgtccttagattccaaaataataaataaatgtaatctcttttaagtcaaagaaggtgtttcaacatagccagattttcaacccatgcaggactctgctatccccaggaggagctggtatgaaattattaccagccaaagcagtggcttcctcacctctagaaaattggatttttttcctcaaactgtttttcagatatcataggtatgtgaacgccccactttgtgcttttactacttttacttcttaaacaatgcaatctctgattaataatgcttgaattttatcagtctaccacatgtgtgtggtccagattctcagtgtgtaataaaatctctaagagcttgctagagaagaacattcagcatgggtgtgccaagtagaatgcagaatccagagtctgtggcttctgatcaatgcctgcctctaccctgccctcacattctaacactagacatgagacaataacctatgctaaagtctagttactttgctttcacagaatagcatcaggaaacatgaagggtcatcttaaacacactgtcttacaggcatcagggaagtcattatttctcttcttttcattttgaagaaagtatggcttgaccaaaattctacaagggtcatggtgattatgtaaagccgggtgcaatgctcaggcacatttagtttctaaacataattgccttacatgagcttgggaaattaagattttaaactgtctatttacacactttttacagaaggatgagtagtcatatcatttggagcattgtgaacaacatgaaaagggaatgtagaagtcaccacacaaaactccaatctgcttaaagtcacaattactagtcactcataaaaaaattaagtgcatatgaacccaagcataataattaggattatttcaaatttattattttaccttacaaaggtgaagggaggcaaatcaattaattaaacaagaaggaacatctctgttatctttgcatcttaggcatattttaaattcatttccccaactcctataaagtcattgttgaagcctaaaggagtcagagaacaggtttattgacaaactaaaattcctaagtgttttacatgtgtcctttgatttccaaaagaagatacaaagctagcaatatgaagaagaagaagaagaagaagaagaagaagaagaagaagaagaagaagaagaagaagaagaagaagaagaagaagaagaaggttaaatagtggcttatatttagtggggctctaacttactgagctacacaagattctgtacagctctatcgattatttagatttaaaaaaaaggctcaatttcttgaagtgtctgatctactttttatgttaataacggagagtggcaacattttatgtccatattggtcacagggaaacaaaccttatcacagtgttgaaagtgtgagatgaaaagtgactccaagctggttaaaattgaaacttaaggaaaaagacaaatgtcaaacctatagtcctcctgaactacttcctgcgtggcctcaggaggtcaggtggctttctctgaagcacagcagggtgagagtagttcataggtttttatgccagaagacatgcacagctgttcgcacttaacagatttttaaatatcatgttggaaagttcacattattaggtggcaagaactggccttaagtgattcctgggagatcatttgcagctgaaccacctccagaaaaatgataaagattcctccacattctgtgaagttcctgccttcacggtatcatttagaaaagagcagaaacagtccttgtgcccagttagaacaaggaatctatctagtttggtagaatgagaagagtctccatagaagccaatagcactggtgtgacagacatttacaagaaaagcctggaaaacttgggaagtttctacatatttcgacaataagctaaatggacaaacaacaggtatggcattcctcttcatccaaactccttttccatattagcatcctctgcaagcatgagaaagtttattttattatttgtgtgtatgtacatgtgtgcattcaggcatatacatgcacgcatgagcttgtgcttgtatatgtgtggtatgtgcatgtggatgtattcaagtgcaggtgtgtaggaaatatgtatacatatgtgcacatgtgtgtggaagccagtgattgacatcaagtgtctttctctatagttctccactttattttttgatgcagaggctctcccaaatctgaagctcagctattcatttaatctagctagccagcaaactctgggtatcctatttcctccagttttctccagtatctctatttccccagatctattctaggcacccatcagtactgtttcataggcttaaaaggcaagcattttaccacccaagtcatctctctacccagccacctactttttttatttttatttttcgagacagccccactaaatataagccactatttaaccttcttcttcttcttcttcttcttcttcttcttcttcttcttcttcttcttcttcttcttcttcttcttcttcttctcattgctagctttgtatcttctttcggaaatcaaagggcacatgtaaaacacttaggaattttagtttgtcaataaacctgttctctgacttctttaggcttcaacaatgactttataggagttggggaaatgaatttaaaatatgcctaagatgcaaagataacagagatgttccttcttatttaactaactgtagctttggaggctgtcctggaactagctcttgtagaccaggctggtctcgaactcacagagatcctcctgcctctacctcccgagtgctgggattaaaggcgtgtgccaccaccgcccagctccacctacttatttttattcttttaagttgtaggggacctagatcagagttttaaccctaaagcattctaaattcttcctaaacatcaaccaagtttatacatggcctgactatacatgcaaatgttttctttgtggacatttatttatgtagaaatgacagaatctggccctaattttaagctcctatccttaatcttccttttcatttctgtatcactgggtgtcattcactgcttttatacggaaataattaaaaaccataaatattctgaatccttattttatacacctacttaaaaaatgggtacaaagggtgttattaaattttatttgtcaaagtagataacaaatatttacttattctttctcagcaacatctgtctaccatcaatttctcattaatttgacagggtaaatgattgtctctaagtgtggaagcacctctgagacttcctctgtttaaaaaggactttggattaggtgtggtgacgcatttttcaaagatttaatgagaacaaaactcagatctgatgtttattaccatggagaaaaagaaaattatttatatctcctaggctattctttttactttagcttattaaactgtcctctttctgtgtctctgtctgtctgtctgtctctgtctctgtctctgtctctctctctctctctctctctgtctctctctctctgtctgtctctctgtttctctctctctctctctctctctctctctctctctctctctctctctctctctctctctctgtgtgtgtgtgtgtgtgtgtgtgtgtgtgatttctaaccaagcatgatgaaaaatgataaaaatcattagatgtttccttcaatgtggtcttaatgccttattatgtttcaagacaaaacataagatatgtaacactaactcatagcaactcgaagggaagccagagccaagaaaacctaggaaatcatcaatctttggatgtgttcatgggttttacagaaaagatctgtcaccttggtctctactctgaaccagcccagaagttggagacctttgggttctactgtgtttgagtctgtcactgtttgactgctgtacaaacacatgcttcaggccctcccagagacaactggatggccgcacatggttgtgactataggaagctggccagctcttcctttggtacaccgaactttatgatccactccatcagaactagcctcccacctagtgacagtctcaagataacaaaaaagtcctcacttcttcccataagacgtacatgtgatgtttagaagttttttgctaggtattggggagatgtctttggtggatatgagagcatgctgttcttttaggggacccaagttcagctctcagcacaagataggcaagtcggcatacataaaggattttctatcataatcactgacattggcagctcacaactgcccataactcaaggtcctagagatctaatgccctcttctggtctctatcactgcctacacacacacacacacacacacacacacacacacacacacacacacacacacacacaatttttaaaataaaataataactctttatatatgcctggcaccataaagccattggactcactaggaaagaccatgctctttactttatattcacatttttctcttaaattcaagaagtttcctgggaaggtgtccccacaatgtgacaagagcccagagggatatagcacttttccttagaagcttgcattttagaaatgaccaatggttcctacagagttgttctttggtctatcatgtttcatcaagaaatatatgctttacatgtagcaaaatttttcactcacaggaggcgaaagaactttgtgactgttttgtatttgaaaaagaaagataaactcaacatctaggatggctggagataaaagataagtggagagtctgggagccagtcagacctggattcaagctctagtccttgacagttaaatggctatggtgtttagttatgatattgcaccagagtgccctggcagatggtacaaagtaggcagaggaagcctatcataagggattttctatcattatggggcacagagtgtcatgactggagggtaaagggacattaagggacaagtgtcctttcattttatagtatgtatagtgtctccaaagatgcttgtgttgttctgttttgtttgaaactgacttttaacagtttcattgtgtcacggtcgccatcacttcagaaacaaataaatttctttaaagcaattcctctatttcagcatgtaacgtattcactcattatttgtggtcagtaaagtttataggatcagaacacatgcaatctaaatcatccttttctaagttaataagctacaatacaataggttccacaaaagcttggcagtcataaaattgttcactgcagtgtgcttctactttatagaataaacattctaagatcataatactgtagtttaaatgaaatgaaagaaataatatagatcagagccacagcacacacacacacacacacacacacacacacacacacacacacaccaccaccaccaccaccaccaccatcattaatagcaaaatgttcaagcacttcagaaaaataaccacagaaatccaaaataccaaagacctagaatataaactctgaaaaccaagaaaacaatcattaggtatttgttatacaatttcaaacacattgtaagaaaaatagtggtatttaaagaaataacattggattggataaaagtgtttatgttataactggttacttttttattttattataattgcaaaatttgtttggggaatttaatttgattccctcccctttcattccttgaagccttcccatatactctccttcaaattcatggcttcttttttcccactaatttttattgcatatttatatgtataaacatatatagttttaaacaacctgtactttgagatgctgtcaaaggaaaagattttcaacttgtatattatttttgaaggtaataaagtgttgacagagcatgacttaagcctgaataagctatccagggctgcacatcagaaagctccaagccataatctactacaaaatcacttcctctgtcatctttgccaggcatttcctacctcacagatgagaacattcagaccctgagtatgccctgaacattcacaaattaagatgggaaaacagggtcccatgttcctctctagaagaactgaagctccacctgcagggcctgaggcttcctcttccaggaaagagaacacaaaggaatcacattgacactgttaaacaccgacttccattgtcttccaaggttagcaattcagctacttctcattttcaatagcataatgtcaccttttatgaataggttcgatttcatgcaagacacctcccatttaatctgtgatactttcttgttttgttcatcagagatttctgaagtgaattgactttctttagcagtgacttcatgttagtatgcctttaagtctctgaaaagtattcttatccacaacaaacaaagcctggtgccaaccaaaggacagctactttcaataccttcctccaataaagcaccttgaaacctgtatttttatacatgcttttaatcagagcagacactgttggtcaggacattgtgtaacaaatgatgacatatattttggagttattgcagatggcaagcaatccccgtgcctttaatgactatcccatgtaattaatattaaattcagatatctcaataactaccactttaagactgtgccagccactgctgcaagtgttgcctctattagctcatttaagcttgaaggcttatgatgtaggtacaatagttctcatacttcagagggagaaactagaccattagcaggttgtgtgactcacttcagtcatatctcaagtaaacatcagattacacaagatctaaacccatctggtgttattcctgagaccccactctaaaccaccatccatgttacctttctacataatgaacacagactttcactgttccagagagccatttcatgttccctgtaggtagagcatggcacaaagacaggaattaagtatcagatgtctggaaaacccagactgtgacctccataaggaggactttctctactgtagtcatcattacttctccagtagctactgaaatattagccccacttgaaaacagaacatcacagaaaaagtctgttagaggagctggccttatatactcctttagaaataaggatatcaattcttttcacacaaaactagagtctcagctgaccctgagctttactttaatggaataccaagtgttatctatctagggactttttaggatgtggaattctctttatatagcaagatgtcataaaaagttgggcccaatcattgcaaagtagtcaataatatacacaaggggtggtttcaaataattcttcactttatgtagtattctgactcatgttccaatgtcatttcacaaacaaccatttttctgggtactaagaaagggagaaaaacatgaccatgctaggttgatgcctcacagagactcaaggagagagtgaaagcaactgctccccaagatgagactgggtgtcagtataaaaacgccagtggacaaataagagcaatttcgttatgtctttaagttcatcagatgccaaacaactaccttctggaaattctgttgggatggcctgtgcttctttgggttgcactaaaatccagaggtaccatgccttggggtggcttctgtttgcttgcattcccatgagccctgctcttcacgcaggtttggagggatgtataactgagttgttgattttacttccttgaaaggtggctcctccctgaggctctaccatgatttcatgttcagatccccactgtttgagtcttgcccttgagctctgtctctcctactctcgatcttctcctctgtgagctttgactcatccaactaagtggaaaagctgttgactaacaagcacttctgctccacaccctataaaattcccatagagaagaaatttcaagatttcaggcttctctttgaaatggagattagagataaaagcaaactatatcctgcaaaaaggaattattttgtttcctccaaaagaactgtgcagtaagttctctgagacagttggggtacaaggaatatgggtagaaacatcacagaaagaaaagtgcatgggtttattcagacctagtggtagtctcttagggttctttaatagtttagagtttataactgcaaaataaggggggtgtgcaactctgtaagacagaaacacacaacctcctttttatctttactaggaattttgtgtatgatcattttgattcttcttacatgtgggggcttctatcccattaatttttggaaacagctctagatatttccatagaagtatacatcaatagatgccaaggtacactagcatcgttttgacatgacaattcaacatatagatgttttcaagagaaaaactgaggggaaataatgttttcatttatctcaacatgtttggtttggtttttttgtttgtttgggtttgttgttgttgttgttgttgttgttttgttttttgagacaaggtttctctgtgtgtatagtcccagctgacctggaactcattctgtagaccaggttggcctcaaaccgagagatctgcctgcttttgcctcccaagtgctgggattaaagacatgcaccaccatctggccttattcagttttcaaatacattatgtgtttatttttaggtatatagtttcatggaaagataccttctttggcagtagtaatttataaaacaaattgaaaaatatgataaatacacatttaaaataataaaaaatgcctggcacttgtgtgttatttccttcctgcatgtgtgcatgactgtatgtgcaaatatgtgtgcaggtgcacgtgtgcgagagaacactgtgcacgtgtgcatatggaggccagaggtcaacctgagatgctatcctctaggatcttggttttgacctatgctatctcaatggaagctgggactcactgatggaccagacaaggtagacaacaagccctggatctacttgctatctcctctacacggctgggattacagccataaagaagccaagataccatgcttggcttctttacatgggtgctggagattgaacacgggaccccattttgtatgccaagcacgccactgactgtgccacctccccagtccatttctcttttttatttacacaactctggatgttccctgtacccttgttgagaggggtaaaataatattagagacaaatacaccaaggtagcaatttagaggcctttagtggataaaagccacccagttcttgattcctgatgtctggtatgctgtggtaaaagtgctgctgattatacacaagggcaatgaatgatataccaatttacatcagttcccgccacgcacaaagtgtttagccctgcttatgcactgctgctttccagttaagaaggaaacaatgccctctcatatttcaaagctacaggaaagttcccaacagccagagttttagccaaacttttcagctaacaattgaatgcagcacaagttcttcacccagccatacctgctccccagggctgacagagaatgggcagtgagtcatggaggcaggtggtagggaggtggcaactctactcaataacgttaaaacgcctgtgtgtgtgagtgtgtgtgtgtgtgtgtgtgtgtgtgtgtgtgtgtgtgtgttatgtgtgagtatgtgtacttgtgggtgggtgtatacacttggggaggcagaaatcaatgccaggtatcccctttgatccatatttttaagataggatttttcactgagcatgaagctcataagactggacagactagctggctcacaagctctaggatccacttctctctacaacctccctgtacacagtgccaaggctgcaggcctgccaccaaacctgggttttgcatatgttctgggaatccgaactcaggtccttatgcttgtgtggcaggtactttaccaactgagccatcgtatcagttaggttgttttttgtctttttgttttgttttgtttcatttttaaataaccaagggttgatatgtagagagagctactttgagtttaggaagaaacctggtgctagggtaactcccaagaatccattaggaggacccaacctaagactcctagcaatagtagagaggatgcctgaacaggcctacccctgtcaccagattgatgaataccccaactatcatcatagagccctcatccagtaattgatggaacagacgcagagattcacaatcaagaaccaggctgagctccgggaatccagtcaaagagagggagggaggaatatatgagcaagggaggtcaagatcataatggagaaatctacacagacagatgagcacagctcatggaaactcatgaactctagaccttcaactgtggagaatgatggagaccaaactaggccctctgcatgtgggagacatttgtgaagcctggactatcagagggacctctggcagtaggaccacaatacaaacctagtacatgagctagcttgttggagaacattccttagggtgagatgccatgctcagaggcagtatgacaatgatataacccagtacatgagctagtttgttggagcccattccctatgatgagattccatgctcagtcttaatgcatgggagatgggcctggctctgctccaacccattgtaccagactatgttgattcttcatgggagttcttatccatgaggagtggactaagggtgagctaggggggagatgagggagtgtgagaggaggtgagagggggtgagagaaggtgagggggtgggaggaggagtggaagggagaactctgtttgggatgtaaaatggaatttaaaaaaataaaaagggaaaaaataaaatgcaacttgctaaaatggaaaaaatataaaataaccaagaattcttattatgcctttaagccttttaaaaaaaaggatatataaggaaaataacctgtaaagctcattatcctcaataaatacccatcagttatgatgaatggcaggcttctcaaatctatgcactttggaatgcattcacagatcgatatatcttggtgggagggggtgactatatgtttcctaaaatacaaacaatgtggtggggaatccataaaccattttattttgcttcttttcatcctataatttattttagtttgagtcttctgctgaattctaatattgttgtggaaggtgagggaaaaatgaagacaataactggccctggttcctcatccccctagaaaatgccagcagccctgaacttaactttcttctctcataatcctaaagcagctaattatgttttgctcaatgacagggtcctccagcaaacactgtttagatgctacagaagttaaattccaaggtgcagcagtaagcattgcacttgtccttaacaaatggatagatgcatgttaggtcttttccgagttgtcttcttggggctcagaacattagtaagtacctcttgtatttattcatgaagttcttgacagacaaatcatttaatatggtaagatgttctctgcctctacatatgagttttacctacttattaaagaaatgcaatgcaaatccatggcacttgctattttttaatcttcactcccactgtctccctctcagttctatcaagctgccactttgttcagaggtgcagaaggccagaaacccaccatctcctgtcctccttgaagttgtacacttactgaatgtaatggctttgctgttattatttcacccagatcctgtcttcaaagataataaaaatgaaacttttaccagcatttttgagagggaggggctgtaactcttccctctgtcctaaaagactttacttttcctttatgtcagtgagagatgccacctcctactggtttagctataataagtttctctgattggtagggttgttgtattatactttaatctcttctaattgtctaaaagtgttacgaccaaacaattaacattgtgaaaggacatccttggctttctccttctttcaaattctctatttagtcttttcacttctaagtttactgtgctttacatgaaaattttatacactaatgttttttttagtctgtcctttggtagacaaagtcataaagcttgaaagaaaacattaaaaaaaaaacacagtgggaaacaaagtcacgaggcatgcagggaaaatggacgaaaggacagccctttgctgtccatagaacaactgtgattaaatctttttattcacttttagtgatggctttagaagccacctgtagaagttgttgggtaacaaatgataacaaaatggagaaattaattaacatcccacatgggaagtgtgaggactgccatacataaggctgagaaataggctaaatgtgctctctatgtctgcatacttttctgttggacacacacatgctttgtgacttaaaatggtagcatagtgtggacatactgtgctttagcctatcttagggtggtggggagtatccagcgttttagcattaagcatgatgtttcccatggagtcttcacactcaggaattactacctgttgctagtgtcttgatctaatggcacaaatggtcttggattttgtcaaatactttttttttacatctactaatatgatcctgtgagtttaaactttatcctccttcctgcagcaggtgggagaattggtgctgaggtcatcagagcaggagagctgcccctgctcctcaacagctgcagcacgatagagagcaggcactgcaccttgcctgagcagcacagcagaactgaccggttggcagaggcagtggtgaaccggactgagggtgggaacgtgggagagctagccccacctctcatctgttatgcagcagcatgggcgagggagagaagtcccccttttcccgttgtcccttgctgcctgtggcaggcaagggagataaccttctcccttaccaaatgcaacacacaagatgtccatgccactgcccccgccgcctgtggcagccaagggagctgacccccttccttaccagccatagtactcgggagttttcaaaatgtctgttcttggtgtctaatttccatccacagacattatttatattatctgactcttttcaagttcattggcttttattttatggtctaatatatggcctatcttggagaatgtcttatatacattggagtgcaagttgtgggtcgcaaacccatatacggggtcacataactgaatgtgaaggttgccaaaaaatggcaaaactgaggatgtttctgatcatgcaattactgaaaattaatccaaagccaaatgcatactgaatctgaggcgtttggtgctgcttttacccatgtttcatcgcaaaactccattagagccttgattttgaacacaccatgtgtgaactttgcactctgcaggtcatcacaccacatactgccaatgaagattgtttaaaacacctcatctcagaatcaaggctactaaaggttattagctgcagcgcttttacagtagattcacagctttctgcttttatgggaatatgtggcttaattaaagaaaacaaagattcctaccatcattcctcataagataggaattaagtagatccatatttgtattgtgttagaatatcataatttaaacatttctcattggtttaatgacttgactttcataaaacaaaaatcattaaatgaatttggcctggagtgagggcagatttccagcaatttctgaagcatccctaaacataattctgccattttgaactatgtgcttatgggaagcagcatctaagcacagattatcaaatcaaaatttgatcacctcttgaaaactcttgagcatattcttcgtcatacactatatccaattagccaagatccactcacattttttaaaagcatacccatcttattagtatgtaaacatactttcacttataataatgaaattgtgtgtataccaaagatttgttttaaaataaacttctccatgatttctcatcaaataaatgttgatttgtatagctcttttatgtgcctctatactcagggctgtgtaaaattttctcaagtgaagagagatgacaagtagaaaaaatttaagtagccatgcacttgagaacagttgttctgctgatattgcactagaagttagaagtttccacagatactcttaggagacagcacatgttgttattcaagtgttctttgctttgcttttaaagagatctgcctatttattctgtccatcatttaaagtattggaattctcacttgctgttgtacttttactaatactgtctgtcttgttttatgtatttcagttactgtctacagcaattgctcctagcctggagaacttcctttattgtgtcttataaagcctgtctagtggcaataaattctctcattgaggctgatgtaggaatgtccactttatattcattttacaaagagagttctaaatctagatttcttagctaatctttttgcttcttctaagcttttgctgttaccccactgccttccctgttaccccactaccttcactctgtcacccccactgtctgctgtcaccccactgcctgccagcctgcatctttactaatgaaaagtcagtgtcaatcttaattgtttttttcttgatttgcatatgaataatcattctttacttgctccttctttgttagttatgcttctgtgtcatttaaagtcttatttttcaacaaagttttcaacatttttcagttatcagtacttgaatttttttccctacctttccttgcatactgaaattaccattatgccttactggcatgtttaatgtgacccatatttcctcttttattttcttcttttttctcctctttattcttcagactggataatcactgtttatgtatcttcaggttctctgattgaaatgcactatagagccctgcaggtgagttttccatttacattaatatgtcttcaacatcagcattatcatccagatgtttgtacactcttattttggagcgagatagtacactaaggcttcttcaagcattatcagtaacagcccattgtcaagagtctggttctgtcaacagactactgttgcctttggggtgtgtaggggggagggagagggaaagagagagagagagagagagagagagagagagagagagagagagagagagagagagagaattacattttttctttcttcaaagggaacaattttggtaacattcttatcaaatttaataatacttctctcaaaatattattttgtttctttgtttagtgactgagccagggtactagtggaatctatttcctttgcacttaacagttgctgagattactgccagttttaggcatgcacatggtaggacttttagcccagctttttatggctgggtatcacaaacaccttagtcctcgctaatcctacctgactattctactgttttcccagttccctggagggtacattgttgtgctgtctggcccaattaaatctgtgcccctgtgttactgtaatcttttagtgctggctcaagagttttgttgactgcatggggatcttgagggggacacttgtggagtttactaaaggctctccttgtcattattcactactatgctctctctctctctctctctctctctctctctctctctctgtgtgtgtgtgtgtgtgtgtgtgtgtgtgtgtgtgtactcttaggcttaaacttccccagtctccattccaaagtcagtttgttggcagttctttaagctctctatgcttaggactaagctcttcacctgagtggaaatctctaaatcactctcccagacccaggggagcagtaagtggtctgtcagagcaatgtccctgcttctgcaacagggtatggagctagaagctagtctctatgctcttggattacctctctcatgatgaaacctctgccatttaaccaatctagactctctagcacattgtctgtcaaatttgctaattttcagccactgtgtatttgattatcttttgctcaccttcttccttctttctctctgggactctggtgacatgaaagtcacaagacccttgatgatttctagtatcttctctgctgtggattccttcctctgtcttctccatctgctgctgagtgttcccaggcagactttaattttgactaacatcctttttactgctaaaatttccactttctccttgtttcaagtagctatttacttgctgaggtcctctacactttcctttgtttcaagcatattcctaatggctacttcaaaactccttgtcagatcatggaagcatctagttcatattaaagctgctaattattaattgcctctttttattcaacttgaggtgtttctgtagcatcacataaatccgtttcagctctcttttatacacaatctcactgctgccaagtggcagtgacaatacaagtgcttcactctggtcctctaagagcaaatgtcttaactctcagctcgccttctatggtggaagagaggaagaaagcctcattacaactgactaggctgcaggctagatgtcacactgtgcttttgctggtgttaatggaagcagggttagcataggtgtttattcttccatggtatttggggagggaaacaggttcttgcctgagagttgtcagccttactatgctgttcctttcctggtcctttcattagagacaatggagtcttttctaggacttttgtctgtctggtcacatcagggttgctgtgtcatctggcctggccctccattaccttatcttagatagatgagacaaagacaaaacacacattgctatgttgtttttcagatattgagttgcaaagccactgtacattcttcttcctattctgatgtctacttaacaagacagatagggcaaagtaggtctaccccatctccgtccagaacaggaggtccattgttacttcattagtttatgttcagttaactaactactaacattgaagtttatttttatttgaatcattagttcttgggttctattagccagacatgaaatagtggtttccagtggtccctatttaggaatggactgtcaatgcctaagaataagacactaactacccacatgaattctttctgaaaaggtaattttagttgacctcttcagccactgggggacagaacttgttcacacttgacagacatctaccattgcagtttgttacaaatgaaatctcagagtttacagacaaaaatacagtattgtgaactaacatgtgtggtttaagtatttgtaactaggataaagaaagcctctgaccacagagataaaaaacaactgcaattggttgttgttttgccaaattgatcacttttgttgtttctataaccagaggaaaatgagaatactcagcttgtatcttcctgagccatctttaccccaaatacccctttcatctttgtcagtgatgacaatttctgctagaaagtggtgatgatggctgccatgtctgcaggggaccatagctgactcctgacttggtgcttatgagtaggtgtttttgctccagggacaaggacatacgtggagtgtgaggaaggaggacagtatggtcaccaacctaattaaaatgaagacaagtggcttactggatgagcttactccaaaggaaacaaataaaggaaatttcatttttgtgcagactccaaggacataaccaactttataaggtgaaatgtaatgtaatgtattcccagactcataagcatatacccactgccttagctgcctacaacacaagcctgcctttcttcagtatgagaaaggatgagagacatacaaaggaaaatgaaaggcagaaatacaaccagtggaaaagtttaattacaaataaaggctgttcttgatttttaaaaagtctgctttaaatgttctcttattccttctcatctatgtgtgtgctagttttcctaaaaagagatggctatcttttcattcctaaactgtagcatgtgaaatctacagataattgttaccatggtgctgtaaggatcccacagcagactaatatgttcttagggctaatgctgcatttaatgtgctgcttcttcaatacagaaacctggaagaagaaaacttacagctattaactgctatctccccttaaacacaccagcattcctgcttgttctgaaaagctgtgtctttaaggttcctaagtgagaataattaagaaataattctttcaagaggctctcatttagatacaagttggccggttctccgtgtcggtaaaataagagatgtttatctaaggagctgaacacgaagggcaaagcactttccactgtgcagtttgttgtggaacatctcaagaaaagagaaaccgtgcagaagaacaggctgttactaaacggctgctcacaccttctctctgaagcttgaaagcgtgttacaaatgtgtctatcccacaaataatcactggtgggaggaggaaaaaagaaaaaatagatacagatcctagacatctgccctttttcaatattattatttctaggatgatacagcaataatgatacagcaataatccaatcagcctcaggagaaaaaatattgccatgttaaaaagtcagaaataatgtttgagccctttattttgagaacttgagaaccgagaaatgatttttaaaggaattatcaaaaataagcatccacaaatctttctatacttttatttttcttattgttatagataggtgttttaaatatttataccttgttcccaagatcaaaatagatattcagatatattttacttaatccaatgaagaattttctatggcatgtaggtgggtattatcttcttagaaatatgaaataactagcatttaaagaggttacattctggggctggagagatggctcagaggttaaaagcactgaatgctcttccagagatcctgagttcaattcccagcaaccacatggtggcttacaaccatctgtaataagatctggttccctcttctagcctgcaggaatacatgcagacagaacactgtatatataacaaataaacaaatctttaaaaagaggttacattcttggacgctgtggctcacattcataatcgcagcactcaggaaacagatgcaggattgctgtgaggctgcacccagcctggactattaagtgaatttcaggacacttgtctgagctacagaatgaggcccccacctcagaacaaacaaataataacaacagaacacacacacacacacacacacacacacacacacacacacacaaagaaaagaaactcaaaaaacaaaactccagaggttgtagtactagctagtatatctaactgataggaagggatggacattagaacaagagatttgaagcccactacctgagttcaaggtagacaagttacagaataactttgcacctcattttccttgtgtataaatctaggacaatggtgttctctaggtcactggctgctacaaaagttagatatataaaggtgtatagagtactgtgtagcatatgggggatatcagggaacttcttgggctccacaaccactttagtggtctccatcctgtcttgatgtctacaaagtccatccttggtccaactgtgggtgactgtttggtgattagactgggatctaggcagcttccatgaacttagccaaccacagcaaatgaacaggacacacttcctgtcaggaaatttgtacttcagaagtagggaactaaaaagggaatgtgcagacaggcccaaattgagactatgtcatgaaaagaatcgggcacaagatattagaagcccaaacaagaatgtgcagctgggagaaaggcaatggggttatatgaataaaaatggccactataggtccatagagaatagtactataagcaggtgtggcctttttagagtaggtgtggcttggttgaagtgtatccctaaggggtgggctttgaggtctcagtgtgaatcagttctcttcctgctgccaggagatccagatgtagaactctcagctacctctgcagcactatgcctgcctgcttgctgccatgcttcctgccatgatgatgatggactaaacccctgaactgtaagccagccccagttaaatgttttcctttataagagttgctgtggtcatggtgtctcttcacagcaatagaaaccctaaaacaggcaacaatggcaagacagactgaagtgggaacatgactatatcctaccacacactacaatctatcctccattagcagttaaatccatgagaattcatttgtaatttgagtgataaaatatttaaacctctctgagcgttaggctgatggtgtttaaataaataatctgtgtactgcacagaataaagataatgtgttctctaggaaaagtccctcccccaagtattctattgtacctggaaagcagaaccctcatctacagaaagtctctagagggaagtcaggaagtcaaggcaggcaagctgggattgaacccagagcctcagagcagccaggagagcactctactgctgagctatgtctccggccctgaattgtttatatattatttattttcccataacttatttattgattatttactataagaacatcaacttgctaatagtcctattaccagcagtgacaccaataaaacatcttttgtggccagggtctctaacttatagtcctagcccctaaaacatagtatcctggggaaagagttggaattctttgtatattgactacagaccacatctgtggaaagggacagaaaaaacccaactcacctgtttatttaaaatggtggcagaagtatcttaccaaggcaatttgttgagaagataatttctttgtgagtgaaaagtctgcatcagagtgggcacaagtagctctggctgtgtgtcattcttagctgggtgtggctgcccctagttcaattattgcccagcagggcattttgaagacctgatttctatgctggtactttccaaagttgcatttaagttgaaattgttttaaaaaatacaccttgcaagtccagaatgggggtttgtctgtagatatagtgagcaatgtgggtgaataacacataaggtataaagtaggataagagtttgacaaaagccattccatgaaaaatcaaactagattgaagctttcttcatactccctgacatgagacacacttggccttccttgtctctgcttactttttaaggctttacagggaacacttgccaaattaccatttcttataaaggaattctcatgctgggtgtggtggtcctcctcccttaacccccgcacttgagaagcagaagcaggtagatctctgagttcaaggctagcctgctctagagagtgagttccaggacagccagggataaacagagaaacgatgtctcaaataataaaatacaaagaaattctcagagataagcagtagctcacagtgggttgtaactgataaacactgtgtatgtttcaattgaatactcagcatttatatcaaagaaatgatacagaaaagtcacaatgattgttgtgtttaagagatttttcagtaacgtattttctaagatatagttcatatgatgatagaaatttttctccaagccctgcctatatgttacgagaggtttaaatggttccctttatgtaagccttgactaaacaaatgaagtatcaacttaacagctcaacatatcatcagttaatgatctagaaaactacagatggattataaagtatgtgccatcttcacatactttatctgtgtggcttcttgccagtaacattataatgatcataaatttggtgaaaaataattgcctgctgctccattgttactattattatatgctttatctcatctattgcaacaactgcttaattcacactcacacccacatacatgcattccagaaacatatgccatttctgtccagtcacaagtcagtaattggctctccttggacccatttgtgcaagctagaaacctgaaatccattttgctcaccatccaaaggcatcctcaccttccctaaatcttgaataatcttgacaatcccaccagttcatccactcctgcctggattatctcagggactcctgaacagttctacattcttccagcctcagtctcttccaaacgacgctatttgatgcagtaaagcaaacatgagcatacaatgatagttcttttcccttttgatggaactaaaactcattatttgttcagtatttcaagaaacaactgaccactgtttcacgactgttcctgtctactctgtccttttaaatttcattttgagctccactgcacttctggctttgggagaactctgggtttaggcacctggcattcccctgcctgcaacacttttcttcatctcatttgctttaatgtgcttgccaatccacccatttctcaggtcctagcttgaatggcacttcccctgcaactattttctgatatctaaatctaggctatgtttttcccttttgctgagggttctgtgtcttcttcattatgaactgtccactgctctggactgttcctgtttcttgactggccaacatccctgccagttaccaaaaagtagtggcctccatcactcaatttcagcccctttcacctcatacatagaaagcacacaatacatagttttagtgtgaaaaatatatagtttttctgtgaaaactctgaatacttgtgtaacaagtctttctctgtcatgccagccagctcccatataatgacaaaaagaattcttattaattatgaaagctcagccttagcctatgcttgtcccacaagctcttatatcttaaattaacccatttatattaatctatattctgtcatgtggcattatctgtcttccatcttgtacctcctgtttactctctgtgtctcctggcatctcccctgtgcctcctacttcctctctctgcctggaagtccctcctccaccctcctcctagctattggccattcagctttttattacaccaatcaaagcaagacattttcacacagtgtccattagaatggttctttataatgcccagcttttccattaacagaagttttctgtggattcaaaccaaaacaataattttacccaggctgttctttatactctatgtctctagaaaatggcatgtttcctatatctatgccccattttcctgatcctcacagaatctactttttctaaactatccaatactcagtaactggccaaggcctcttcatatttctagcattactttatggtattaccacattactttaaggtagcagtgatacatggaaacttactgcatacatgtgccatattcttctttggaatcgattcatctaagcatttgctatgatagttaatggcatgaaccttatagaacagttaaagttttctaattatatttctctgtacatatgtcttctctaatgaatggaaacagagcagaaaccaagactccctcattgtacgctgaggatagtgctcaagatattgtgtgctaagtactgaaaacacttagaatctggtgaatttagcctatggcccacagtttctattgaatgtttaatgttgcctatgttacttgctatttgtcagctgggttaattgtttgttttgtttgtttgctttggctagttttaatttttcatttgtaaaaataaggtgaatggtctgctatgaattaatgtttcaaaatgttttctcattggaaaatattgagaagtactgtacatccagccttaacttcagctacaaacactagcagagcatcagccatatagtagacactgctgtggtccttgtggcaatgggacaaaagcagctagtcgatgggcagtggtggtacacacctttaatcacagaggcaagcagatctccgtgagttccagaaaagcgggtctatgtggtaaattcctggatggtcaaggctacacagagaaaggctgtctttaaaaaaagtagttagtgatctccacccctgtaatgcttgcaatgctttcatccaggtgacagaagggagacagtaaacaaaagatgctaagtttcattaaatgtttgatagtgacaaaataaaaagatacaggaaatagcacagaatttggaaagggaagaggttcaaaagaagtagaggtagttggaagacatgttcataaattacaatgtcatatgtggcagccaagacagacatcactgagaagaaaacattcccacaaaagcccaagctagttcagaaaacacagtaaacatgagactgtattgtggaagaatattccaggcaaagcagcaaataacctaaagaaaaatatgacaagggtcttgcagaaggagtccgcagcctcatgggatatgacaaagtaaggaggaccattacaaaggcaatattatgagacagtgtacagtcatttcttatgaggctttataatccagcatacatattctggcctttgctttgaacaaagtagggaaacatggggtataacaaagcaaggcctcccattatctgaggctcattttaacaggatctctctggctgctatcctgaaaatatactgtagtgggagtgcagagtatttgtggaggcgaatcagcaaaccactgggtatggactgagagagatgatggagggtttgaaatggctttgaaccaattctggatacagttaaaagataaaggtaacaggatttcctaacaaataggttgaatggtaagacaaagagaaagaattcatggatttccccaagatttacttggataactggataaattcattagcaagagcaattgcatatagaataggtttgagggactgtaaaagctcagctttagcatgataaggtcaagatatctcatagacaaaagcctgaaagtactgagcatatatgtgctcctagagttggggttccagatctaggttctagatattgggtctagattctggagtttggagcatatagcattatagtaataagtctaaattatctggagtaagtgaagtagtttggagtttcttccaggagggagatgatggtacagggacaggatataggaacagctctcgaagtctgtgtctttttcttgaaacactgtatctcattatgtgctctgcagcactggcatttgtatcacttggggataattattaaaatatagatttctgagcttcttcctaacatgttattagaaattctggaaataatgtctagaaccttcatttttaataaccctttcaggagatttttccatttaactttgagatttcctttaataggagcttaataaatatttgctgaactcattcacatttttagtttctaatttttattcaataacaatgtgacactcagaggttcaacttggtttcagttctaatggtaattgtgaatctgaattgtgatccatatcttgtcaattggggtgagtacttgcgaggtgtttgggagcacactgtgtcagctgaaatggcagagcacagaggagagactgactctgatccttgattctgctgtgacacggggcagaagccttgaaattacacagtgtgacatcaaaatagtagtgagtcaaagcttggggattatttcttgttttctctgtcctaggttctccataggggtttaggccaaatgatttctcagaggaattctcggttatgttattctacatttctgccctgatgtttctacaaggaacacactgaaaagcatcacccttgactacaacatggcctgcacctgagcacatttccagtccagtgtgcccagattcattctagggatgacaaagttacctcctctggggctttactcagctgccaccagacacagatgctggccacagcctgttgctggccttaaaaagaaaaggctgaagcaaagcaggtcatatctttccacgatgcttgtgactgtcagacagacaactcagcaacatgcagagcagagaatcagagatgcctgaaactaagttgttgtcctttctaaagagtttgtgctaagatgggcataatggtttatgcctttaattctaacacttgggaggtaaaaacaagcagatctttgtgagtttggagacaacctgctctaccaagagagttccagagcaactaaggttgcacagaggcaccctatcacacacacacacaaagttgtgttactgtaggaagcacccagtaccaacattcagcccttcaaatctgaactctgttaacctggaacaatgggggcttttcatctctagcatcagtttccaaaaccatgcaccaccaggggtcaaggtgcatctggctcccccaggaagtgaatcctggttgcatgcacaaccacagaatttccctcactctctgcccaaatatacagcaagattgatgttggataacctcctattcccatgagtaacatttgacttcttccaatgacaaagatgagctagagcctgccacctagctagtacagatactatcttcctttcctgagaactagaccacatacctgataccccaccaatgagtagaacttccattgtgtttgctgaaccatggaaccagaatgcaatcactcattgtctttaagcatcattctcttgctgagaaagactccactctggtccctaaagcaaggattcctattctgaagtgtacataagagtcacccaaaggacttgtgtaatcacaaagtctggctgctaggtttctagctctgtaggtctgagtagagcttgaggatgggtcctatttcttacaagatggcaatggtggtgctctgaggatcatactctgaaaaccttcccagtagaggactgaaacatttacacagaggaggcctgcttgtacctaatatttgaagagtggcagcagagggaaggagagaggaggcagaggggagaggggaagggaggtaggaaagggggcctagggaaaaggaagagagagatcatttattggtgatactgtgataaacaactcacttaaacttctaatgcattaatattgatatctgcaatttttgaatgagaatggtccccataggtttatggactccaatatttggtgcctagtcagaggagctgcttgggaagaattaggaggtgtggatttgctggaggaggtgtgtcattgtgaatcagctttaaggtttcaaaagagtcacatcattcccaatgtgttctctctctctcactcactctccctctccctctttcattatctgtctgtttgattgtccctctgtctgtctcctgtttgtggatcaagatgtgagccctcagccattgctaccactatgcctgtgctgtgctgtcatggactctaaccatctgaacccataagcccaattaaacattcttttatgagttacattggtcatggtgtttcatcacaacaaaagaaaactaatacaatttcttcacattatcatttgaattttggcctattagtgccacacaagctgtaggggatggagacgattctaactctgcagacattgatttttatagcaacaacaactatgctatgtttctttattcactgaactttatcacagtcatgagtgaaggcaggtccccaagtcctgccattttgtctcttccttcctttttcagccatccatatagtcaaggtctcaggatgcctcaaagacacattatgactgggataatacctgtacttcaagacttcctgaagaagaaaatggccaatatgtttataatgccaaccacttaatattatgatgatatttttaactgtgaaataatctagtctagtttagaattagccatatgtgtaagtcatagattcctcctattattttggtcacatacaatacttagatatctggaatggtaaagactctttatcataaacatccagatgctgtaagtgttaaacacccaactccatccagtatgaactgtgcatgctcaaacctacaaccacaaacaagagcagccaagtaaatcaaagacagaggctactggagagggtgattcagcatggaatgaaagatgaaaatgcagagagtaggaggcagaagaaggctagcatgtggtcatctctgaaaccacaaaggcttgattatggagaatggtgaagtgtctgcatataaatccatcacaacatcacacactgtctctatagtcaccattgaacctaacccaatgtcaatataaactctgtggaagtagccaccatgcaacactattcagagaacaatggaaaatatctatatattcacaacagatgaactttttaaagatacatttttgatcctaggttatttgaattcagatatgcagaacctacccaatgtggaaggctgattgtagtttgagcacatctgggtttaaacatggcagcattgtcaaacctgtgctttcttgaagacaaggtctgtgtctgtcctgtctccctccttcttggttgcatcttaaatgttatttatacatattatagccaaataaatgtgttatgaataatggaaaggaagggaagcagggaaataaagtagaaaaaggaagagagctgccatggcccttggcaaaattttcattagttcctggaacatgtgacctcttccaaatgactgtgcttccttcctgtctaggctggtggttatattcctctttttcaagattttttttattataaaactgtttttcttctttttttgatacttctaggcagtatctgtttcagtcaattagactaacatgtatatgcagaacctttgttatttttaatagaaaaaaaaagctagtgcctctagatgtatcgtaaatcactactttaaccttgccatgattctgtagctagcccttgctcccatctatctatactgttctctcccaaaaacgttcattgcacaaaggtcagggtagttctctgggaagagaagcaaagaaaaagaaactgtgcttcttattaagggcttgttattatgaaaacacacaccaaaagaattttttttgtatgaaaccagccttcaggtctggtcatcccacgttggatgtgaatttctttagaccaaataatgagtcattctaaataagagcattaatttacttgcacctttaatagtgagagggtggccatagagggtgtattacccagtagcaatgattgggaaaaccacacgacaaggttaaaacaggcggccctgacacataactttgccaaagataaaaacttaggatttgggctgggctttggtggcacacgccttcaatcccagcactcgggaggcagaggcaggcggatctctgtgagttcgaggccagcctggtctccagggcgagtgccaggaaaaaacttaggatttgtgagtcgaacatgaaaagggagaaaatatgttgtcctgtggctctcttcttgttttatttacatctagcacaccagcggtctatgagcatagaccagagtaatagcatcatctaggaatgtgtttgctatatagattgccagagtccctcttagaattggatccctgtgaagggtttcctgatgcatgctgatgtcctgaaggaggcagggagccttccaatccctcctcatgcttgctaatggcaaagagccatcgccagagttcatgcccataatgcacttctgtgtgatcatgtgaggaatgtacaccccctgtaactggtgaggtagagataggcatgctgaccaccaggacatgatccagctggaagctctgataaagccccagccacagagttcaggactcacaggccacctgataactgtttagcctttgcacactggaagctaccatggcccgtgacagggaatctaaggatgctcacgtgtaggctgcctgccagacacctggtttagatcttgttgtgaaataaagatgaagcaattagcttcctgttgctaaatggacttctcctggtgcctcttggacatgctttttcccctgctgagccttgctgggatgaattaggggctttattgtcccaccccacattccacactctgaataaatagaaagatggctcagttggagggatctgaagctacaaacacacattcccagttctggccaatgcaggactgcccaccaggtctcacatcacagctagcccaggcctaagaaataattattcgattactctcgggtttctttccacttgtttatgcagctacttctccccaatataaattccttctcatctatctgtattatttaagttatgataagcaatctactttgctggagaaacgatcactatttattttatttcttctaagcagcgatatggggttagagggggaagtcaggagaatgtgaacaggaagagatggggcagcaaaagttctcattttcttgtgcagatggatagatgctatctatgtttcattctggaaacaactggtgaaaatattcagtccacaaagtatcatctttggtcctcaagtatgcatcagtttaacccatttcttgtgtatgtatataatatatattttacatattatttatataattatataatatatatatagtcctcttttccacccagcatttcactctttctcagatgcttgctcttactacttttactgcatatttctgtacaaaaccataactctaaggtgatgatagtaagttctatgtttaactatttaactgtaagattagcctcaatcctcaaggttgcaagtcctacagacacacatttgtgttcccatgtggcaaattaagaggatttctactggttcagctctatgagccacttcctcttcctcttcctcttcctcttcctctcccttctcctcctccttccctcaccactctccctttctttctctgtgtccaagaggtgaccttggatgtccccaactcaactatttttacattactaaaagtaatgcaatgtattcaaatccctccaatcttagaaaagtcagaccatggattcattcctgtattagggaaattcttttctaagagtgctgggaagttactcatgaattcagtgctatcaatcatgaatgtttctttgcatcaccaaaatgctaaatgaataactcaaggttctataaatgaaaacttgcaaccctggccactgaagatgttgctttgactagatacttccatcaacagtatcttgaagcattatttttttgaacttctaatagttcattcttgccttgtgatacccactcagggggataccagggatggcaggttatgccctgctttcttcatagccccaaatcctctgaagggtctttccatgccaaccttgctagcagattcaagtgggagttgattcaggaagtacaaagcattgtatggaagctaagtcagaagcaaacttgatccctgtctctgagctgtggggtgcaaaggaaaaaccaggcgtaaatgctctgttttctagggcattcataaaacaggcactttcaaagaaatactttccttctacttgggtaataggaataagatgtaaaaagggttgggaggaaattaaagctgggaacaaagctgcctgaattctgccatgggacaaagactataaggagaaaaaaaaacccttgaaaataaattatttaccttggagtcccaataagaaaaggacaatgagaaaaacacttagaaccaggctacagaaaacgaaacaaagcaacattaaaacaaattccaataaagtatcttctagtttcattttgttcttggtgtataaacaaaaccttacatgttacattaatgcctgcgtttaaaggttcaaaattaagagttctaaataactagcatcacaaaatggaagaaacagttaccttgcaggtttaaagtaatacagtaaaattctagaacccatcagaaacctcccaccgatatccaacatcatgttactgaaacactcagctaggcatattgtttcatgtgaaattgttccaaggtgacaacaacagtcgctaaggggaaaattgaaaggaaacaatcgagttcctagcaccaaagtggtgcagccaacattcttgatagtggtggcttttgaggctaagagatagggatgaaatcatttacctttatccctttgctcagcttctctgaaggcagtgagcagagaaaccatgtcaaaaatctccaggaactagctgagagcatcatctgctacctctgtctggagaggcctccatagaatttggccactactcaccactcattccacttaaactaaacaaagcctaagtgattccaagataagaggctttggacaagctgtgactttaaaaattaatctactttgaggtatagttgcccttgtaaaccagtgctattttccatttctcactctacaggaaataatgcaagttaagggatatctcttctgcaaacctgagaaaagcataagatgcaggaacttatacatgttctaaatgtttccatatggggtataggcattgcagaaaggcaaagagagcactgttggaggcagagatgctgactttgttgcatgccaattcagatgctgtgcaacagagatacttgtctgagctctctgagctttggttttatttataagaacacttctcttcctacttcacttgatagctgcaatacttatatagttaaaagagattatgaaactacttctatatcctgtagagagttggaaatattgtcatagctctcagatgatacttcgttaaatgaagagtatcagcttttgtttagtacatgtgcctttggtaggtctttgttgctcatttaaaaatagcccaaatcctcatattaaaaaatataattaaaccctttataggtgtttttaagtgtttcttattttatttattccttagctatactaggaatagaaccctggaccttctgcatgaagctgcatcattcatccaatatgccaaatcctttccatttttttcttcttgaagtaggatcttgctaagttgcctaagccagctttgagttccttcacttgctatgcaacccaagcatcctttgaatttgaaatcttcctgcctcaacctcccaagtagatggaattacaactttgcatcaccaagaccctggggtaaagccttaaaaatcagtctcttcacacataaaatttcatatatactgttagcttaatggatgacactgctaagtttgttaaggttcctcagcagttgacattcaggcatggtaatttggtgttttgcagcaacctccacagactgtcagttacagctcacaaaccaactatgagaaccaaaattcccccagatattgtcagaaatgtcaggaagggtgtgcaagagaacacatgcacaccaatattagaagcacccacttaaattgtaagtaaccatatatgggagacaaagaagccacaacagtataaaaacatgggcactgcaacatcttgtatgataatccactagaagattgatggtatagtaaactgttcctcataaaagaagtcttgcagtcctatgtcttggactggcaagcctgcagagagagagaccgaaacagagagactgagagatagagagagagagagagagagagagagagagagagagagagagagagagccctcaggctcatgtgcacacgagaggtaatttttgttttagttttagaatctttggaaccctggagtctactctagtgccacatctaactgcaagcttgtcaacaatggtgtctctgggcttgactacatctctaaggtggctaaacaggtaagttttaagggacctcccagctctaatgttaagtttacttcctcgccagtttctttcctgaattagatttgtctttggagactttatgccctttgtcttgcaagatgatttcagagaacttgatgaaggctctgagtttgattggtatatgatgctttcacacctgagctccataacacctacacctcatataatcttgtaacccactgcacttataataagaaaacataatggacataggtgggcttggaagtgatcacctagggaacggtgtattgtttgccttgttattaatcacactcccttttatctataacacccatttgctattggcttcgagtcaaacttctaaaggaaagatcatatcctccaatcactctgaagcaattctttccccagtttgacacactattagaagaaaatgtttgttttttttaaatcaacttttgggttgtttccaggggcaatgtgaaagatctaacaacttttctcccactcagataaagattgctccaaattaaggagggccaagaggcatccccacctaatgatttgacagctgtgtgctgcccacagcgatccttctctgatgagcccagaatcctcccccaagtgtgaattcagactctggccctggtgtctcaggccttccttatctcctcctgtccaaacatacccctcactgtgcatcggtattctctgcagcagtgctgtttagttcagggaagtcaaaaagagcagagtggagactacaggagtctagggaatgaagagacccaaggagaatgacgagaaagaagtacctgggggaaccatgtgctggggtagtcagacctgaatggtaataacaaattgttagaggttgggcagagatagcctaagagttaaaaatccttagagacagtcacaggtggaaggaacagttcctgttgtgagttgtaagtccaggagcttattcaggttgtcatggtaaatatgtggggtggggtgtttccagaagggaaaaggggaaaggactgctgttcaagcaaacacagagctttagaaacatttttagaagcattaatgctgagctttagaaaagaagtttatatgatttgtaacaatgtgtctcaaaaaacaaatcaaatcagaagaaaagccatgcaaaactaaagcaaggtagatatggaggcacagacctgccatctcagctctagggaggctgaggcaggaggacagttataagttcaaagcaggcctacaaaatgctaccctgttctcacaaagaaaactaactacggccataagaaataaaaacagtaaataaaaatgtggatacctagccttgaatgtggtctatcacatcattaaaccactggaaaagtttaaaaggcaatataaccataacttattgaagcatgctttctaaagcaaataaggaagaacttcaatgtcttaatttccaacatgtaatattaatgtgggactggattgagactagttaagagcacatgttgcttttgcagaggacccaggttcagttcccagagcccacatggaggctaatttataatcatttgtaattcctgttccacaggaactgatgacctcttctggcttctacaggcatggcattcatgtggtacacataaaatacccatacacataactgtaaatgtaatttttgtttgtttgtttgtttttgagacagggtttctctgttcaacacccccctggctatcctggaactcaatctgtggaccaggctcacagagatatgcctgtctctacctccagagagctgggattaaaggcatgcaaagtaaatcttttaaaaaggaatattgatgtaacaaaaatcagaatgcccaattacaacaaattaagaattaggaatgtagctcgatgttacagtactcatagaatacttgcatagcatgtgtggaagtcttgtgtggtgttgaaaaagaatatcctctgtgctgcatagagaaacacaggaacaaagcaaaggtaaattggagagatgatttctttttgctaagagtgctccaagacccaaactaggctagctagtagcacatgtgaccatatagtccccggtttttatccctaacacaatggggagcttgactgttcctcattggctgagggtcaattttcatagtctgtgcccaattggctaacctagaaagtgaagtaaaggaaatgaggggagataactaacccccaggcccatctggaaatccagcaaggcctttatgtaaacaaaagctttaccaaattgggtggggagggtttaaaaaactataattccttttcataaatgtcttacaagataggggagatttacagaattctgtcctgaatgagatagctaccactgatagaaaaagaaccatttctcctagtgttataaacagcaataaaatactgtcatataaaatagcccatatactttgtattgaaatactagaatagaccaaactgaaagaaagcacagattaaagaaatatatatgcaaaataaatagaaaaccaatactctaataaattggagaacaaattaaatccaaagtaagcaaaagaaactaaagtgtaaatcagaaaaaataaattgaaagcagaaactaaataaaaatttcaaacacttttcttgaaaacatcagcctggtagtggtggcacacgcctttaatctcagcactccggaggcaaaggcaagcagatgcagatctctttgagttcaagaccagcctggtctacagagtgagttccagaacaagctccaaagttacagagaactgtaactttgtctgaaaaaaaaaaagaaaacatcaataagattgataagactttaatggtgttgataggagggaggacagggaccagtaacacaaatgatcaattcaggaaatagaagaacatatatctaggagatttaaatggtaaggaaggaatactatgtactgttttagattcaccaacttgataaatagaatggaccaatttaaagaaacatttgatctgctaaagtttacacaaataatggactttccgagtagacctctatcaagattaaaaaaaaaaaccaaaaacaaaaacataagactcaggtgggcccacatcctaactatgaagccaacatcaaaatttcaaaatcagatgtcataaggaaactatagaatactatcagttataagaaaatctaccaaaagtccttagaaagtactcataagcaaaatccaaccatgtatacagagaagtacaaggaactgaagacatggatcagtaggtgagagtactagctgctctttcagaggacccagattcagtttccagaatccattctgtggctaacaactattggtaactccagttccaagggatctgatgtcctcttctggcctttgtggacaccaggtgtatacatgatgtacatagataaatacaagcaaaacactcatgaatataaaatggaaataaagaaatgaatctccagaaaaataaataaacaccatgataaaaacatactatcacttgatgtggaagtctagtaaaacatcatactatacacttcatcaaaaagttgaagaagagcttgaggtcagccattaaaggctaggctcacaaccaaaaacatgttgaagaagaaaaatcacaggattctaccaacagatccaaaatcaacatatactaatactgtactagtggggaaaaatcaaaaatcttcgcactaaaatcaggaacaaaggcaagaaaatcattacaattatttcagcattctacatacaatcctatcctagcaattgcattataaaagagaagggatttcttccattttcccaattcatttctttctggtatgcagctgaaatacataaggacttcattgactggttcctttatgggcaggaccagtcaggctaagtaaaaggccttctagaagactccttttcctggtgctttggataatttttttctatgtctgcaacctcttccaaaagaatgaggtcttactattcacaaataataacccaaaatatatgcaatgtatccattgagcctatttgcttcagatggccctggaaattccacatccttttctcttcatgcttcaaataccaaagtcactgtgatggcaaatccttgtcaacatgactagattgggaattgtctaagagtcagattttccagagttttactgaagaagaaaactcatccaaaatgcaagtaccaccatactactatggagttggtgtgtgtgtgtgtgtgtgtgtgtgtgtgtgtgtgtgtgtgtgtgtgtgtgtgtgtgtggtccatatatataaatatggaatttgggacaggaaagaactcaaggaaggaaccacctggaagcaggaactaaagcataagccatggaagaacacagcttactggcttgatcctcctgacttagttttctttcttctacaccctaagaccacctgctcaggggtgatgccattcacagcaaactggactgggtcctccctcatctgctattaatcaagacaataccccacagacttccctacagtccaatctaatgcaagaattttctcaattaaaatattctcttcctaaatgattctagcttgtctgaagttgacaaaataaaaaacaaaactaagatggcaggggacccagactaaataggaaggggggagagaaaatggactgagaaccagctttcatctctatttcctgactgctgctgcaatgtgagcgtctcacattcctgccaccatgccttcataggctgtatgaaccaaaagacatccttctttccttacatgacttctttaagttatattataacatcaacaaaagtaactaatgcaagcaaccttcttcctgtttaaaatacaccctcactatgtttggtttttgttttttaaactaattttactaaagccatactgagaatttgaggatttcatttgcttctagattgcttcactaatgtcagcattagaaaaccaaatggtatcttgctgataaaatagccaactttatgttatttcattgtagtgttgtgagcaaaagtgtccctggacagagtgctgtttgtctacaccaacagtctttctgtaagtgacatcttctgcccctaggctctctggttctcaatcaatcctcaaggctctgctataaagaacagtgaaccaatgagtgtgctaaagatgaataattttgtgtctcagaattgaaccctgtgtactcaaaaggtttaaacacaaaagaatcaaaactaccaactacatataacttgagatattttttagagcagcgttttgcttgtgtttccaaatcacagcatctagatgagtacttcaataaaaaaaaaaaactggcagtggttttgtgatgtggcaggggtcttagataagtctgaagtagctttgcatgctgctaaatttagtaggaaaaaaagggcaaaagtcaactctgacctcagagctgtctaggaccattgtgaggatggtgagcaaggttgggcatgattttgaagctgcaatggtttgaatgagaaatgctccccattggctcaggcatttgagcacttggtaccaagttggtagctctgtttggagaagttatggggatttgaaaccttgctggaagaagtacaccactggatgtgggctcacagcctcagcaccttccactttgctgtatgcttcatgctcatagaactgtgatctcttggcttcctgctcctgctgccatggctccccactgccacaattgactcatccctctagaattataagccaaaatctctctctattttatgatgcctttgatcatagtgttttatcacagaaacagaaaagtaatgcccgtagactcatatcatgtttactccctatagtgcattcctgcttgcatagattagaagcggtccaagaaacaaacataatctggctgaagacctctggagaaagtagcccaggaacaggtctctcagttggaaaaggatgattcaatggcaggagagtgaactttaagcaactaatctccaccatgaatggaataaagtgttagtgtaaagtactatgatgaggtcaaggtaaagaacatcaggtgctgatcttcaccttctgaaagatatgggcacttaggagacatagatgcctcctatctccagatgacttacatacacctcagctcccatgagcaggttgtatatgggttgtccatttctgacaatgaagaaagcccttgaaggcatagtcgctcctctactctgcccttctggaccaagacatgcttgttttctgtaggtcttgggtatttccattcatttggcaataaaagctaacacaagaacgaactgtatcttcctactgtttggaaagtctggaaactttcatcagagtttaattgttacaaacaatcaatgctttataccttacaaatttattctgtatgtcctttctcttttacttgagttacatgtttaaaatgtttttcttatctttttctcttcttctgactatgcatattactttaaaggctcctgtatcaggttttctgttttatgaagcagaattggtgatgaaggaaacatctagatattatgaggctaagacacatcttcctttacctctgagacagttctgataacacacaaaggtccagagaagtatagagcaaactgtggactcacgactaccttcaaaatgtctcttgaactgtgaaggggctaggtgtaaagggggagtcaaggaaaaagggtgactgaccagagtcattctgcactgtatgcaagtaaagaaacatcacagtcaacccccattaatctgtatgactcatatgttttaaaattatcttttaaaaggagtcttctgaattaattattaaaaattcagattttcaggcttattcaagacgtactgtaagagaaatggggaggtggattccataaatatcatatttcaacaagtaaccctgagtatacctattaacattcaaattcaacagtctagtggtctagggaggacacaatgcttgactagtacaaccaagataaaaattaaggcaatggttcctcaggacttgagtttgaacttgactgggttattataccttgctccagcatgctaatatcacaaattcctcaatttgaatttaattagaactctagttgatattctagttgatattaataagagtacagcgggtagctacaaatcaacccataaaattgaaatgacccattgattaacctgtgtgcttaccaaaagaaattcaagacattgaaatgtttctagccagagtatcaccttgtccattattggtgggcatgggtcatctacccatgctctgctgatctccaaaagcaatgattctagggaaccaggcccatgtttcatttatgtgatgccacactgaattagttacaaggatgtcatggtttcatacaattatatatagacaaaatggctttgcgccacttcttttgtaaggacaatgaatttctgagattaaaattaatggactggggcaccaaaaatctcagtattcacattaattatgtgttcattttcctttggcatttacaaggtaatacaagtgagaaaaatgtttattgctcccaaatggaaacataaacattaacaaggaaaggtgaaatgttactccagtgaaaagttgatttggtaaacaattacattcagagcatttgtgagtaatggaactctctattgcaaaaggatgttattagcattttaaagacatatagtactcttatctgccaattactaatttgtatgcactttgtaacagattagtaaccctattggaagactgctggacttgaatcttatatacttcactattaaaaaaagtacatttttttaccaaccactctattagatttatttctgtacttctggaccatcagtctattgaaagacaatccttaactcaacggagagatgatgcttcccaatctgtgattgttctttacaagctgaaaaagtcctttttaggctgttcttaagccacagcatgcaaagcagttattctaagtgcaattttgtaagctaatccagtttttccaacctaatttatctaagattatttaagttaatgtgtctaactcctcacagatcagttagtaaggaataattgtcatgtatcccaaatgtatcctacctacaagaaattggctaggttcctctctgtcactcattatacattctccattctaccatattggtacttatagtatgcatttagcaagtttactctagaagactgagtatgcaagttggtctaatataaagtcattacaataaataatatctgtgcaccataataaagtcaaacagaattggtatggggccaaacacaggaaatagctgagctcagacagacctgcatcctgaaatagagctgtccaacaaagtaaagtctaggtcatctgggactcagcaatcatgttccacatgcgtgtacaatgagaataagtgagtcatcacatatcctctgtagtttcttacacaaaaatggctgattgatacatagatcttctgtcaagtaagataatttgccaatacagacttcacaaatgcaattatggaagcatgaagttactaaaatagtaccttcagtgtgctgagttaaaattaatagtctactttgatgtctaccaagcaaatatttctcgatgtttagttggaccaacataagtgtgtttgtttatatatgtatgtatatttagaatcaacaaatgtcaaatccaggaagaaatcacatatccagaaggaaattctgaaatgaaagaaagaatggtggccatgctccttccctatgcagatcaaggacaagaggagaggaaaagattttaagagcctgaggttaggaaggactgcagcaaaaccatgtcttctgaacaggtaagagaaattgcactcttgtactcacaacttctatccacaaaatcaagccagtcaaaattctagtgtagctggggaatagtgtaatgaaggcccacccctagctgaggaaccttgatggctgaaggttgatggggtatagagtgtcagctttcttcagtaagtagtatctactagaatgaccacattctggtgggagatcctatacctatacacacaaggacagaacaaactgaactcagcagactttaaaaagaggacatgacagtagaaggacaatatgtccagggagagggtttttgaggactgggtagggaaatggtcagggtttgtatgatcaaaataccttacatacatgtatgaagtcctcaaagaaagaataaaaaattatggcaatagtctcaaaagaagaaaaaaaaggggtgaacaaagggacttggaaatgtatagctacatttaaattaatatggttatggttataaagtaatcatggctaatgagtgtgttgttgttattgaaaggagggaattaaagaactaaacaataccttggtaagaataaagtttgtgacactattttactttcagataaagacagaaactataaattctgtcacagtaaaaaaaatacatagtgatatttcaaaagcaatcagcaaaaatcagaattaaagtatgtgtaactttcaacccaacaggaagagaaaaaaattaagaaaagtgtaacggcttggataagaaatgtccccataggcttacacatttgaacacatgatacccagttattgggactctatagagaggttaagaggaaatgaagccttagagaaagtgtgtcactgggaagagtccttgagagtttaaaacactgtaccattttcagttcattctccctatttcatgtatgtggtagaacacgtgatctcttagcgtccttccatgccactctgcccaccatttgctgccatgcctctctgacatgatggattcttattctgctggaaccataagccagaataaactctttttctcataagccacttttttgttttttagttttgtttttggagacagggtctctctacatagccctgctggccttgaactcacagagactcccctgcctctctctcccaagtgccagaattaaagctgtgtttcactatggccagcactccttaagtcactttttatggtgttttaccacagcaacagaaaagtaactaagacaaaagtttagtaagcaaataaataaaataatttattaaaggcaagagatgaacagaaaatgaagaataaaaaaattccacaaacagatctgtgcattccagaaattcagcatgtgttatgattatctacataaaagcaaaaccccgatatatatgatttatctcatataattcacaaaaattagttctcagacattctcacaatactttgaatttaaagcagtattttaaacaaaaagaaacaatacccataaaaacctaaaaagctcagacactgcaaaaattcttaaaactatcaataatttaaaaaaatccacaaataggaaaaatatttgcagtaaatatatacatatacaaaagaatactaaaacaactcccaaacatcttcaataaaaaagaaaataattaaacactaagtaaataaaatataattattgaaaaactcaacttgtaacttcagaaaagtataaatgtaggagttaaaaacataagctagttcccatacttactggtgaccatagtaatacaaaataagaccaatgagatttaattttgtagccactatactagcaaaacatattattaaagtttttttacacttatttatttatgactgggagtgaggtgtatgccatggcatctctgtggagatcagaggacaagttgagaaattcagttctctccttccaccttgcaggttcttgagatcaaactcaggttgtcacacttggctacctcacccacagaaccatctgaccagccacttaataaagattgtttttgacaattctttgaagctgctagtaggagtgtaacttagccactgcccttcaggactctgtagatcattcacacatccagctacctattggtcagattccaaaggccatcaacccagacactctcataaagtgcagcaggaagcctatgtgggaatagttacagcatagcaattgtgaaaaaggacaatcatgaagcaaggaaagataaatgagataaagctacacaaaacattgatgaatctcagaaataatcttaaatgacagaaacaatcttaaaatgactattaaatcatgtgactttttagagcttaaaagcagtgaaggtgcacagttaagctgcacaattcaatatagaaggatgtatatatatatatatatatatatatatatatatatatatatgtatatatataactaatattttaaaggaaaaaagataaaatgcataaattaaaacacattttgttcctggtgtggggcagttaagaaggggagactcaagatgaacattactaggaaacttctagccgttagtagtgtgttaattcatcatatgtgtgtgtgtgttacatatacatacaaaatatatatatagtatccactacatgcatattatatgtgtatatatagacattacatttgcacatatatactccccataataaatgtgtaattcataggatcattaattaaatatggcagaattctttttatggactctagttcagatgtacagcaaataattaaagagaggtagacatatggggctgaaaactgcctagaaggccattattaattatgttgagttcatgttgagatataaaagtacatgttagacaaaggcaagagtcaagaaatacctacattctgtgaaattgtacaagcaatatagaattttaataatgtgaatgtatacagaaactaatctggaggaatatctcagtccataaagtgtttgggtattgcatgtatgagaagtcaaattcaattccccaaaaccatgtaaaaaaaataaagctgggtgtgatggcttgcactggcaaggctaacacaggtgtatctctgggacttgatgactggccagctttgccttagtttgggagttcctggccaaggcgagacagtgaatcaaaaacccaaggtgaacagtatttgaggaaggcataaaaggttgacttctgacctccacacacaggcatgcacaattaatcaaacacacacacacacacacacacacacacacacacacacacacacacactcacacacacactcacacacacactcacacacacactcacacacacacacacacacacacacacacacacacacacacacagagtatgtttatggaaacagagttttacttgattcagcatcacattgggatttggtttcactaaatttcctctattaattacaacttgtgatgctcatatagaaaaggaatttgataaatgaatatatgaaatctacatttctcaagaactttcctagaaactctttgaacagcttgtcaatttatctactcgtcgttgcttaggaaagatactgtcctgacttttaaaccattcaaatgttattcattggctatcatcactgtggtagtgctaggatcctagcaaatatggatccctgtgccttgcagtaagtattggaaatgccaagttgacaacatacaatgctggacacactgaagtctcaatgagtatcttccgctacaatcacactctactattggaggctcattgtcctggctgcttaaataggtttggtcaattgcaaatctgtaagcagtagaaagaagatgaaatcagtacaggttaaacatgcccctctagtggatttcacagttcctgccctgtctaaatagctactttgtctaagtagcaaataaatattttcaccatgaccatccttcaattctagggaagacacctagggagccatattttccagagcctcaccactacagtgatgatagccagggacaattaatgagtaccacttaactggtgtaatcttccctaaacaatggcttgtagatgcaaggataggctgttcaaagagtttctaggaaaattcttgagaaatgtagatatcgcatattattcatttagcaaatttcccctggccatggtgtttctttcattaaatgctagttagttactcaattttatcctcccatatgtttcctgctaaatctctgactcacagattaatagcttttaaaataacaaggaagaggggaggaaaagatatgaggaatgaaagggtcacttccagctggagcaattttagaggaggaacactacaacacatgcaccatcagagataaaggcatcaagattgagcatgccaaatattatatacagcagctaatgtgttccttgcttcccattgttttggttttcaatcttgtttactaggaaaatcccagaatgattaaaaggaaacaaagtatgagttgggttctccagtttcagcagctgtgcttatattcagtgcctgtaaggtcctgagaattaaaagcctgtgtgttccttagattcaacgttagaatctggataatgcagaatcttgttcaaagtgttatcaattattaatcttacatcaggtcagttgactgacactgttaaatagcattctactccaatatctaaccttactatgctcattgcaagcactcagcaaattggtcacaatgaatatgcaaatgaatgtttaaacagaagtacactcttcatcatgacaatgtcatcagacattgattccaagcaatcttctacatcatcaaagggggcagaggacaagcacaatctatgttccaagaatcatggtgtttggttgacaggcattgctgtttccagagaaattgctacattaattaattaaatttatttggagggacataaaagtggggaaataatagtgttgacaaatagcaaaaaaaaaaaagcttcatttttacaaagtgcttttgttttttgtggttttgaatcatcatctcggttacatagagtagaacaaactgattcagacacaagccggtgctgaaaatccctctactcacaaattctgcagaatcatctccaccttcagttccagtgtataggagtcatctgctctggcgtcccagctcattagaagccaacagcagtgtctccagagttgaatccttttcattcattattcaatattgatatgttttgatataaaggagtgcctgcatttgaaacctttctttgaaataaaagaaattcttggtttccacaaatgctcagccatctcttattcaaatatgtgctcctcttaagaggtgtgaaaaaccaggattgttaaggggaaatatgtttacagggttttttcctctttggattatactttgttagcataatctctggatactagatttatggcttgtctttaatatacctcgttccaactgcatagatgactctaaaagaacttctttcaataaaaaagaaaaaaacttgtaagcttgatcatagatgtgatggaatctagaaaaagaattactaatatattttaatacattaaaacaaggcaagttgggtctgttagtcatttaacatcaagtactcacatataagtgctgtggcataagtcaaaatgtaaaagctgtaacttaatgttgtcactaacccatacttgttttcataaaaatcagatttacttttaaaggattatacacactgacaatgaatttgactcattctttgatggtaaactatatacttagaaagtccaaaattggataattttataaattaaactactattttcaatgcaagtacaaagaaaataactgaaaatctgaaggtgcaaaactagattatttattatttttcctcttgacattaacagttgtaagccagaataaaagcttatatggcaaccccttttctgaaaggacaactgtcacaagaacaaggatgggctctcagtaattaataaattcacaatgtcagaccactttgtaggccagagctgagtcaatgacaggcccaatgatgacctggactgcaacttgaccaggagcgtttaattatggattcagaggtatccactgtttgaatacaaagctgctaccctgaagacagacttagagttagtggaccttttcatttgctccccttcttgatggggcttcatttgaataaatatcctatcttttcttcttcccaaattcaaccaaaaaactataagccaggcatcatagcacatacctataatgccagaacttgggagactgcacagaagaatctatagtttcataaatagatagcaagaaagaaatgccctcaaagaagaagatagttgctccaaattctgtatgtaaactctgcccatatccctgggtaacctgtcaaacatgcacatgctgggaaggctcacagctcaactaaggctgatccggttgaactgagagttcagcttctgccacaggaacaggtacaaatgaagtctgagtctagtccatctagctataagctagaataaaatggagtcagcaggaagcctgcagaagagcagtgacaacagctcacaaccatagcatgccagctgtggtttataatgattatacaacaggcaagtaccagaaaaaggaaccactggagactgatcccaaacaactcaggtattaatttaaaacacgaattttgaagatcagatgctcaaaagccatataggaagtcagtgaaatgctccaagatagttttgaaactgttgagactgttattgtttctctgatttgtctacaaacctttatgtttgtctcctacccttcgtaaactcaactccaagtgggtcaaggacctcaacataagacctgtcctgataccccaaatctgataaaagttgaaaaagtaagaaatagaaatatgcttgaactcactgacacaggaaaggattttctaaaaaggaccccaacagcacaagcattatgaccaacaaaaaagaaatggtatctcgtgaatctaaaaggctcctatacagcaaacaatacaggatttgagtaaagaagcagcccacagaactggaaaatatcttttttgttgtttgttttggagacagggtttttcagtgtagctttggagcctacccgggcactagctctatagaccagactggcctcgaactcagagaaatccgcctgcctctgcctcccgagtgctgggattaaaggtgtgcaccaccagtgaccagccatgggaaagtattttaccagctatatacatctggcaaaaggctagtatttataatgaactcaaaaaaaataaacattaagaaaacaatcccaatttaaaaatggtgcatgaaactaaacagagttctcaagagatgaaatacaaaatagccagaaaagattttttagatgctcaacatctttagccatcagtgaaatgaaaattagaactgctttgagatttcatcttctcccggtcagaatggtcaagatcaaaaaacaaatgatgacaaatgttggcaagagtgtgccaaaaagggaatacttaatcagggctggtgggagtacaagcgggtacagtcactatggtaatcagcacgaaggttcctcaaaaactaaaaatagttctaccacatgatccagctataccactcttgggaatacccaaaggatttttatattctactacagagatatctgttcattcatgttcattgctgctatattcataatagctagaaaagtagaaggggcctagatgtccatcaactaatgatagctaatgaaaaagtggtacatttatacagtggaatgttatttagctattaagaaaaatgagctgggtggtggtgacacatacatttaatctcagaactcaagaggcagagacaggctaatcactgggagtttgaggctagcctggtctacagagtgagttccatgacagtcaagagtacacagagaaaccctgccttgaaaaaaaaaagaaaaagaaatttgaagacaaatggagagagctagaaacaatcattctaagtgaggtaacccagacacaaaaagataaaggttgcaattttttctcatttgtttggtgttagcttgaaatctccagataaatatgtttaatttgaaatgctcataaaggccagaaaattagtaaggggcataaggagtggagagacagaaagtggtgatataaacactcaaatgggattaacgaaatgagaggggtaaaactggaaaggggagtagaaaggggaatgtggttaaggataaataactctaaagacctttgggggaaagtaggaaacatacctactactgtagatataaagagagaatgtagtttacctgtaatgaaatcacaaagccataatctaacaaataaaaagcctggtgctaggaatagtttcttcttctggagttgtcccacagacccccaaatattacaggttattgctaatgctattgtttactctccagaatttgacagtaaggacatattactgaagatactacacacctacctgagtcacagaatattgaaatagtgagctggtattgacctactcaggaaggaaagaagcttcattcctactggcttgctttcacagtgctagaagtggctatccacactactgggggtggggaggaagttgcctttgagcttacacagttgtgaacccttcaagttacaataatgactagtctggcaaggcatgctctctggtgcaaaagtgtcttaaacatcatgggaatagccaatcactctctaattagatttaagtccttctccagaagatgacattcatgactggcaccactgatgagccaaaaaaaactgtgacaagacaattcataggccataggggagaatctgctactattctactgaaagacttagtaataaactgactcctaatggcatatgttattcccatagattactgggtctctcaaccctcatcaaataagcttctatttgtattagtgattaacacagagacccacaacttgccaaggtaaaaagactgtagcatgcctgtccctaaatagaatatctataccctttcctcccaagactcggggactgtttcagaggggtggaaagactgtaagagtcagagctggtgaatgaatacaaggaaacaatgttctctagacacaagtgagcagctccacatgggaactcataggagttttaacagcatgcacaagctccatgcaatctcaaaccagaccagatcccagcatggagaagggagtaagacatgaagtctcacacctaagcaagaatctgctggtgactgatagctgctgggagaaggagagctggttttctttaagattgttgcccctactaggtcaaccatgctccagtggaatatcacattaccatgaatatatgagtggcacaaattggtcttgatagctgaaaacgcacttggaacacaaagtagggaggggaggcagatttggtaagatttggatgaggatcaaatatggtcaaattttatgtgaaattgtcaaaaatataaccactaacttttgaaaagggaactataaagacaatggaatccagtttcatagtttttttatagagattacacatacatacactagaatctcagttaagacagctattgtggaaaacaatatagagcttccaaaacacttataaaggaactaccatatgatctaacaatcacattgtaacatgtacatctaaaacaaatgaaatagaaacttccatagttttgtggtgtgtgtgtgtgtgtgtgcgcgtgtgtttgacaaaacacacataatgtcctcaaaatttgacaatattgaggacattatttcacagatgaaagaatcaataaaatgtggtacctgtgcacaatggaatactaaacagcctttaaaaggaggaaattctaccatgtgcaacagagtggatggaattgaagaaaagtgtgctaagtcaagtcagcacagaaaaagaaatactctataacttcacttacaagtgagatctttcacagttaaactcatagaagcagacagtagaacagtggctaccggagactaatcatcatgcagagggactgctgtgctgcagtgatagaaaattcaggctacccttaggcccacagcagcccaatgtgatccaggagtcacatgcttcgagcaagtttgtcctcttggctccttaccgtggccttatgggagaagatagtcggaggagggtcagaataaattctttatatgagaggttgtggaggggctcctttgggggaaagaatagaatggatgttttatagaagaacttagtcttcgggctctggtagaagcaagctaagcccctaatttctgtcttaccacttgcataatgtcagatgatcccgttgacctacctgtgtggcaggagccacatccatgaaacacagctgaactaaattagggtaattataaagattgaacatgatctttctctgtaaacaaaatgaggttgcttgagtttagctattgcttttggttttgctacagttattgctatcattgctctattgttatatttccactgatctggaggtttatacctctaaatggttttaaagtataatatgttaactttcaaaaccccatacaacagccttaagagaaaagaaagaaaacatgctgtggttttgtgagagctgaaaatgaacctttcaaattcctttttacttccagatactgaataatgcacaagttcttgcaatgatacataatgaatgacagagcttacatttattgaatgtctattaaatgccagactctggtcataaaattcatatacagtatttcatgtagtctctttaaaagagctgcaaagcagagaacctctgtgtctaatggatgcacagacagagattcagagagactaacattcggaagattgtaccaagaatcaaatcaacgttttcctgatcttatattccaacggtttgaaacttgccatgttagacaggaaaaggaagccattaaggtctgagatcctttctggtcatgctaccaatctcagagagtataggaaatcattatatatgtgttaccaaaggacactcattacattcaaatactctgcaggaattgacttcttcctaaatgccatagggcaggtccaaaagcttggaatttagaagttagaaaggaactactgagagagaagaataatggaggtgtagagatgtatgagacgagaaagagaggaaagagagccaacactgagtgccttgtaactacagcacaatatacagcaatggcgtcttaggtacagaaaggttgtgaaagtaaacatatggtcacttccagccatgctggcttccttctgtctgtccaagcgttactcagccctctgctcctcaccgaatcatttccctattgaaacaatatggaacatgtagaattaatgagagaaagccaagcaacggttgtgcatgcctttgatcccagcacccaggaggcagaggaaggtagatctctgtgagttcaaggccagcctgatacacagaatgagttccaggacagccaaaactacacagagaaaccctttctcaaaaaaaaaaaaaaaaaaaaaaaaaaaaaaaaagaactgatgagagaaaagcagtgagacaatgatgaagaggattcagaacacctcagactgacggtcagaagggcagggtgaattaatccttgacgtgcactgaccaccctttattcatcagcatcttttgtctcaaaacaataccaaacaaaaaatcataaactcatccggtcttccttatggcttgtctactgcacacaatctgcaccaagtttcatactgcttaattggtttgatatcaggttggagtttgaaaagctcactggcccattagaaggcaggagttgcttccaacctcccttgttttgtgcaaggtttcttaacaggccctcagaatagttgagttgattctcaaatagtataaagacaatttggctgaataaaccacacttgatcttctattcctggccctcggcattttgcattttaagctcctatgctctgatttgaacatgggatgttctttatagactcgtgctgaatgcttagtccctagctgagggtgttttgagggaaagttgtggaaacattaagaagtggggcttcactatatgtatgtaagggacatggcttggaatattgtgcctggtcctcagtcctttcctctctatctgctttctctctgccatgaggtgaacagtttctcacacgtgctcctggctctacaatgctgtgcatcatcatagatccagaatcaacagagccaaaaacagagtgccctgaaattgtgagccaagataaatccttccttccttctttatttcctagcttcctaccttccttacttcctccctcccatccattgtttaagtcaggtattttgttacattataaaaaaaatctcaatacaatgtattcattgaactagtgactggatgggcaaagagatggatagaaaagaggagccacattgcatctgtccatgtggagtcctgagatcccttaagccctacaaaaggtgggtgatagaacatgtcaccttcattctggcagctgtcatcatcggggcgggggcggggggagttgggaattttctagagataaaggtgttaacaaactacttgtagggctgcaggagtgagaaagagtgggctggagtaataaactgacagttgggcccaacacaatcgcaaactgcttcacactttgtattttctgaaccctaactacactgccatctgggttgtgaggtcttcagcatttttttcctttctctacatttttgtaaagcgatccaatgactttgcttttagaactggaaaaaagtcacaattgttcatagtagtttgcatttcccacacattccaattttgtgacagacagaaatgaggagacataaagaaagcaagcagcaccatccctaccaaaaaggtacttagcatttaatttcagttcttgaagagtcaaaagctgtgattttctgtatgcatgactatgctctgtgcatggcttcctctcctatcagacatgacctgaaactgatacaaatacaactttctcgtgtatgagtttccaagcccaggcaaaaagccaagcaagttctctcatgtttgcaaaactgaaagacactctcagagaccactgagacttgtaaagaaaatctgggcacattcttctcagagtttagggataaagagagttcttggaaagggatcataataattaatggatttttaaaaggactaactgtgttttggtttaaaagatgttctttgaaagcctcattttccagccaaatgttaatgacaatttggtactgaactggcaatttttaagtaggtgatgagcctgataaaaggttctgtctgtggcttttctgtattaaccaaccagaggcacattattcctagagagtgacaggctcttataccggatacttcgggagataaaaattcacaaaaacagtggtgcaacctggataacaagctttccgcttgccaatgagtaaggtgtcacatgccagaaggccttcaagcatcacagcagggacagacctgctgcaaccaccaggatcttgagatttagacagctctgttgatttgatccaataatatcttctaaagtgaagattcaatatagcataggctagcacaaaaacaaagagagaaacctatggagtggagaagaggtgttcacacaactgtttgtagcttctgaactggcaaatgagtcacaaaattcttcaaaagaagacctctgtaaagacacaggaaacttgagcctttatccccaaagcaaggaggagtctgagtcacctgtcacctctctctctctctctctttttcttctctctctctccccacatggagaaatgacctgtacctcacatagtgggcatgccggtcaccctactgcaatctttgcatgatacatgactgtatttaaatagtaaccaaaaatatcttcaattactttgtggcaattaaaatttaaaacactaaaattatttaaaataataaaggacacagagaaatgaagcgtccccaacactatgcatcacatagaacatgttagccactctgtttgttacttagactgaatataatattgtttctctgtaaatatttacaagtcctctgacaaaaatgaacacatgagtgtcagtgaggtggctcagcaggtaaaggtaattgccaccaggcctgatgacctgagttccagtcccagattctgcatggtggaaggagagaactactccagaaagttgtgctgtgaccaccatacctgtgctatggtacccctgcatgcacacatgtaagtatacagacacagagtgagagcctgtgtttgtaaataaatgttcaaaaaaaagggccaggtacagtattgcacacctttaatcccagtactgaagaggcagaagcagatggatctctgttagtttgagaccaccctgatctacatagtgagttccaggccaaccagggctatgcagtgaaaccacatgaattggagtgcttccatccaacagaaaacacaagtgtgtctacaggatcttttccatgtggggtagtaaattctaacaaaactggactttcaccacaaagcagaccatctgtgggtcataagtagaccaggtctcttgagaacagggagcatttttacatctgggatgtcaagaaagtaggctattgtgatttgctcgatattgttcaagtgcacatttccctaaacgtgactgactagggattcagaccataaaatttaaaaaaagaccaagcttgcaagaaaaactaaatctctaaacagaatgatgtttttcttcctttagtttcatgaaaaaaatagtagtcagggctgtggaaatgactcagtgacagtgcctggtgtgccagcgtgaagacctgagtttgattcctagcactcacattaaaataccagacaaagctgcccagacactcataactccagtactatggggtggggcagagacagggggattactgggacttgctggccaccagcccagttccatgttcattgagagaccctgtctcaaaagacagagggatagagaaggacacctaatgtttttctctgttgttgcacacaggcacacacacccaatacacacatatatacacaccctcccttacaaatggataagtaatagagtaatagtcaatggaagcttgttctacctaaagttacttgttcaacttataaattggaacgtgtaggttgaacatgcaagggttatgcttattttgtcttgtttgttagtaaacttgattgtttgatttggtttcatttacaaatgagttagaagaaaaaatatgaacaatgtttgaatctctcaacaacactgaatgctgtcttgcttgacaagcacaggacaaacctctgaccccaccacccaagcccaggaaataaattaccacttgtcaaaacaaaaatgcaggccttgcttccaccagagaatttggccacacagcctccttctgtgggtctttctagaaacgatatatccctctttgtccctctaactctctgctgagaaccccaggccaaataattcagacattcaaatgtcaactctgaggggacatgcaaaggagcagttttcattttcaatttccattgcataatttttccttggctcaacacttctttgagctcagcagggctgtctgtagggtataatcaatgatgcaaactgatccaaaatgtggatgaacgcatgttggatgaaggaaacagcaaggggaatatctattggattccccagcttttagagtttataattacttcaggatgaatgtgtatgtgagggggaaagcccaagtttctcccctaaatacttagcctctagacacatggagtttgaaagcataaatagaagtcccctcgactgtctttagtgggctgcatgaacagaggccaaaagagattgaggttggctctgaagtccaacccaaagtgttgtccaacatttgtgttaactcagcctccctcgaaggctttggtgctgggagggaaaggggcctagcaatctggttagcatctggttgtctggcatcaacttgaaacctactgagttctcagtttgaagatgctgaggaattcttatagataaagcacgatcttggaaagtgtgaagaagcagatggctctctcaaatagcaaatctagctgcaggagacaagcacccaacaagctctctcaaaggagcaattgttctcttcccaacaccctctctgctaacaccacaggaacccacttttccacttgttaccaacttttaggaaataaaataatatttgaaaatcacagtagtcaattatgcatctttttctcattttcagactcctatttgatcaccatcaacaactcattcttagaggaatcccaatgtctttcctaaagtcttcaccaggagaatttaccattttatctagatgttttcttctttaaaacacaagaacaatctttgaaggtttagtttctcattcaagtattttctttaatgcatcaagtgaatttctagtggcttcgggcatacagaccagaaagcacttgtggaattaaaggcttcatggcaattaaaaatttctgtgcaaaactcctaaagccttaaagtattggctcagcagctgggaccaatgccttatatcattcacaaacccaggagcatcagtgttctcttaaaagcaggtcagccaaaaggcacattctccctacttggtagatgaaactggagtatctgttgacattggtaaaactacaggtcatcccttagaatcggcttccaggtcaattctttattgctaagaacttcttgcatggttgctcgttgggcctaaggtatggaatactgaaaacagagatcctacatacacagtgtataatccagtaatggtctgctttcaatcatgttctgccatgatatgaagaatgaaacatgaggtgcatgtgtgccacactcccagaaattaggccaagttgtaggcagttctcacaacagtagccaaagtccatatactaattcccacttgtaaaaaaaaaaatgttgggcataaagaagtgaaaagacattattatagacaaaagtttgagtgtatcctcaggttttcaagtgtgttggatctccgaaacctgtaataaatcactagtaaaaattatcaccattatattatgcaacccatcagttttgtgaactccctagttcatgcacacagagatctaatcacttttctggggactattttacagaccacaaatccactacttcctccaaatctttattagggttgggggtatggggagtgtgcgtgtgtgtgtgtgtgtgtgtgtgtgtgtgtgtgtgtgtgtgtgtgtgtatgagcacacatgtatgtgtgcttccatgaatgtgcttcctgacctggagcatgctaggaagcattcttccataaaacaatatacatattggtcagacactttaattttgcagtttagagcaacttcctcatcaagcattggtgttgagcacaaatcccttcctattctaactcattaccatctcttaattttcttagtttcctttctcacaggatccccactgcccattccagtgaaaaccgaagccactgctcactctgcctctatcattgcagtctttctcatttcatcgcgctggtcttcagaacttcaggactgtttcatcctttggtaaacccaaggcaaatcttacaaacaccaggtgtaacagtggtgctgttagaatatttattataaaatccaactttctgttcaaaactgtccaggaaggagaatggaattggcatgtatgactgaaaggaacgaaaagctggtgctcccagaacctgatcatctcaattcctttctgctctggtggttttggtttctcaactcaaaggagggacttccacacatgacaggatgcctagccactgaaagcctcagaccttcacagttcttcccatagaaaggtccaaattaccatctcagatccaatctgggactccccttggaaaagacttagatcacaagtcatgccctcctgttgacctttaggtgatgcctgtggcatcatgagaaggcacaggcgtaggagtgacagggaagaggggaggaagtattctaaagagaacgacttctgagtgccttctataaagaactgaaagaaggctttaaagagatggttgaataccaggatttagagcatcaatgctcagcatcatatccattgttcaaagcaagccacaggttccttgactagtaaatagaaaagtaacttgtaacatacatatacaccataggatattagttagctctaagaagggaaggaattctaacacctgctactatgtgttaaatctggaagatgttatgtttaatgtaacaagccagagacaaaagactttaaagtggcaaaaaatgacacatgtcatcttattttattcatgataaacaaatttagatttttgtttttggtttttttaatgagaagagtcagtactcataaaaagagcacagtccccgcatgggaccaaactagatccctgaatatgggtgacagtcatgtgacttgatctgttgaggagggctggcagtggtaccaggacctaacctcagggcatcaattggctttttggagcctactccccgtggtgggataacttgctcagccttgatgcagggagaaggggcttagtgctgcctcaactttggtatgccagactttgttgactctccaaggaaggcctttccccctctgagtagtggatgagggtgggaagagggtggaagggggacgggagaagggaagggaggtagaactggggtaggcatgtaaattgaaaaataaattaaaaaataaaaattcgagagtcaaaagggggaggggcacagtcacagatcagatcatcaatgccactgcaatacagatggaagacaattcatcttacgatgagctaggccttagggaagggtgagtacaggaaccctgggtcacactgaggaacgggaggaaccctattcacccaaggcatgcttgaacagaacaagcagaaaagatgaaaaaagctgccatcagcttcttgtacttatctgtgtttgtaactagaagctggagactttggttcaacttgtagaaaacaaggaagaaatcaataacagactcaacacatggtttaaagtttgatgtcccaactatacactttttttaattttagaaacaatcgtattttacatatcaatacccccattccctcaccctcccatcctcccatgaccccactggccccccaacccactccccaaggatagtgaggccttccacgggggatcatcaaagtctgtcacatcacttggaggagggcctaggccctcttccgtgtatctgtgccacaatagtttccctccatagggagtgggctcccaaagtccatttgtgcactagggataaacaccggctccactattagaggtcccatagactttgcaggcctcctagctggcacccacattcagagggcttggtttggcccaatgctggttccccggctttacgactagggtctctgtgctcttattaggtcaggtcaactgtttccatgggtttctgcagcaccgtcttggctcctttgctcatccctcctccctctctacaattggattccagaagtatgactcagtgtttatctgtaggtgcctgcttatgtttcaatcagctactagatgaaggttctaggacatcaaccaagatagtcatcaatctcattataggggaagggcatcaaagacagcctctccaccactgcctagagtcttagttgaggtcatccctgtggatctctgaacatttccctaatgccagccctctctctaaacctatactggctccctctatcaaggtatctcctttcttgccctcctctattcctccctgcatcagtcttcttgatccctcttgttctcctccccccccttctccccttctctttttcctacctccctcccccacccccagtgctcctaattttctcaggggttcttatccctttccccttcttcaggggactatgtccaacatacacttttaaaattaaatacaaaccaaacacaaagtcacaacattaaggagataggaaaatactgattcagtagactcccaggaatgcacctcagagaaacttagtcaaatccactagaaaatatgggtcagaattctctgtagcaatgatacttgaaatgaaaaaaatatcgagactaactcaaaatgtcctttggcaagaaaatggctcaatagtgtagtgtaatgttttgttttgttttgtttttcatgtgatagagtaatgtgcagtggtgaaactaattaaatcgagttactgacattaacacagacagatcttacaagtataatgctgagtaaaataaactgtaattcatataaaaagttcccatactacatgctgaaaaattacttttgaaaacaccaataagcaactctctaaagaaatgcaggaataataacagttgcgggataataattatccctgagcagccatagaaaagaatattaaaagcagatcaagaggtgaagttagaatatattgaaagtcttttgcttcttaatctggttggtaaacatgggagtattctattcattttaaagctaaactggacacaaatgttatagaacacagttaatagaaaaacatgtttttagggagataaataaagagatatgccttccatatgtcctatgatgtttatgccagagaaacaaattatttcataaaagatactgggcaaagctatgcagtggtgtgctgaagtcagccaccaaaatgaaaacgtgccaatactaaatttcattttgtatccatctcttcacttctgactatatattatttcctgacactcagaaaccagaagagagcataatagaaaggatgggctgagaacacagcgaacatttagacactctgtgcaataggcagggagagagaggtgtttgccatttgtgaagttttacatagccactaagaggaaaatggtgaacctggaccctgactgaacatgttctcactgcaatgctcccttgcttacaatgggtggttcaaaccacagctcccagagcattatgtaaagccttacacgatgagtgaaaatatttctgattagtacactccccaggtaacccactgtgctctgtttgttcagcttatttcaaacattggcaggggagggggcccgaattgtacacagagaaaaacggatgaaagctgtgatgcggctttctgctttggcttggcaaattggagtgtgtgcttgatatgatatccagctattaaagttcacaggcactgaaatcactttgtctttctatcaaatattgtgctaagtctctagcgtaatctcagcatatggtcctggactggatggcttctggtggaactcatgtgtgtttgaatggctcctacattccaggaacgtaaaagtgagtgatagtgttgacaagtgtatctccaacgatggatctcattagaaaatgtctcttaactcatctgaacagctgaagcagccccttggtcatcttgttctgaaaggagcattctcccatgacagaagtggagtagatttaataaatagtttctaaaaacttaggaaaatcctacagtcggaattttatcttggattttttttcctttccaaagaaaaggggggcattcagagaagagactttctagtgtctgtctcaccagtgtctctccaaggccacagaataatgtccaaagaatattagattccaggaggaagcagaatcagtggcctcacaacaaccaagacgatgaacagaacacatgtgaggtacgatgcataggaaaaatgaagtcacagcctacattcctcgtggcagagccacacacatggacaacatgtcaggaaaagattactcagacctatacacacacaaaataaacgtacagagctggggaaatcttccaatagttacaaaacagaagaggaggtaatccaaaaatgaagtctccactcataaaaatcagtccaaagagatagggccagttggaaatactgcaaggctggattccaagaccttcttattgccagtgttctcaagatttatttgacattcaggcaacacatattaatttctctaaatatatcctccaaaattaagctcctgaaccatctgaaaattagcagtatgccaatgacaattacattgtttaaagtaaaaaaaaaatgtgtcatttggataaatgtttgtcacatcttacctaggtaaggaaactgaaaacaaattcaacttcacagagccttaaactaggcatggtagcacactcctataatcctggcacctagagagaaggagggaggaggatcaggagttcaaggtcaacctcagctacataaaagtttgagtctacctgagatacatgagaccctgactctaaagggaaacaaagaacaaaaccttactttgggaacttcaaattcactcagtgggaccttgtaaagaatacagattaggaccaagcctgagcagaattaaatccatccacagacccatccccgataggcacattctgaaacctagcctattcccctgagctgtttttcacatgcttttcctttacacagtattccatctctcaccctcccttctctcgagcactttcccaaatgtctaacaaaactcattaaaacttaaaacaaaaaatacagacagttggggctgaggccagtggcagagcccttgtctagcatgtgggttccatccctagtaccctcaaaaagtgggagaaggagtaaaaaaagaggaagttatatccttcaaaatatcctagggatgattacaaagactagtgatccaagaaactcagaaaactgacacgtttctattcaccaagtcacttcagaagttctcatgtgccttgctttgtgccagcagtctacaccaaagagaagtcctccccaggctaacagtgtgagggcacagggagacagatgcaatgggccttcttcatttccatcactattcaggtcctccatcctattggaatcagcagagatgatacaaagtggagggtactgtctgcctttactggctgctcagttcatgctctgagagcaagctttcatcccaagaaccacacctaactgaatggaaatgtctctaggcctgtaacggcaaggtctctcaggccctatttagtacaagattcagtggcaaagtgtgccattgctgatttgcaatgtctgccactcacaagagtggaaagctagtagcatccatatctcctgtttgtcatccttacatgttactcctctgagacctgactgctctgtagaattcttttggcaaagattcctctggaaaagtttttttttatccccaaaaatcttgagagtagcaagtttagccttatagccactggacaggggagaatacatgggctgaagttggctttgctgagcacctccatttttcccagataggaagcaatttcagttagttaacagcccagagatacagtaaacatgctcctcatacgtgaattcacaaggcagtgtaaataatacctctcctccactaatggtgtcttgagagaagagcagcagaagccctggcaaaaggaatgtgccagaagaagccctgtggaactcccaagtgcagggcttgctgaaagcagcaaggtagaataagggctgacctataaaatacatgcatgcaactccacaactctttaacaaaaaggtatccttaaagataagatcatcctatcttttgcaagcagcctcttcaataaaacaaagatgaagtcaaagcaaattattgccatagtgtagctacaattgggatcagaatagaggaagagccagattgctattccctccacatacttctttcaacacatggaagttaagaagcaaagggaaagtgtacatttacttattacataattttaaatatttggcctatggtttacttacaattagtgcaatctaatatgtgctagaggttacaacctgtagtggttgactttgtcaacttgacaaaacatggaaagtatcagtgagggtgtgtctacattgagggtatctgtagaggattgtcctatttaagttagttggtgtgagaagttccagcccattgtaggctgcactgtttcctaggcaccaggtcctgaactgtgtaggagtggagaaatcaagttaagtgcaagcaagcaagtgatcatatatttctctcagctctttctcaaggatgtcatttgactacctcgttcaaggttctgctaccttgctagaatggatggcaacatggaactgagctgaaataaaccctttctcccctaagttccatcttgtcagggtattttatcacagcaatataattaaaactaggatgtagcccagccttctcaaatagctgggaggtttccttctatctgaggactactttcaacctctgaatgtctgcacagctcttatgtcctaaggggacacttttctctcccagctgccccatgagcacaattcctttccttataaattatgctatcgctaacaaaatttgtaaatcgtgctaatagtcaccctgcccatcagatttcctacagactagagtactctcactagaggtagaaaaagaagaaagggcaacaaacacgaggagtactctatgctctttcctgatctctttcttttttagttggaatctatagataaagaccttctagcctgtcctcaagctgggctttttttgtctcagaggtgttaagagcagagcttattgcttcttaaattcatacccaccctcattctaaagttctcaagaagtactttggctcatggtctcatgtccaaagatgggaaaatgggttctccctagtgtgctttcttcaaaatttgatcaacctaagaggtgggtgtcacttcactatgtctatggtcagctcctgctgtattgctcgggacttcgccttcctgcacactgaggattgggtggaagatagatgcagagaagaaagaaaaatcaggaagaactcattcaggggggagaatttcctacaagtcattcaagtggatatgtatgtctcaggatgtgattcattgctcctgcatgtgtgtggggtttgtatatagggaggatgttttgttttgttttgaaaccggatcttacaatgtataacatgctggccttaggctcttgaccttcctgcttcagcttcccaagtgctaggactaaaagtttggaacccatatctcatgccaggatctgagtttaaggacaggcaagcagagctagaatcccactgttctgaagatttcaagcctgtagtgtaaaacaggagggaagacagggagaactcaactcaacttaccaaagtccctgagtgagaaaaattcaaatagttggagttgaaagttgcctgctaaagaaagggaagacagcagatgtagatgtagtgaagcttccatctacaagcagaaccaactatttttaggggaagaccatacacctttatatgagatggaggttccacatcattttgctaggctccatcttctctattttctcatcttctaatgggtccctcatgtatatcacaaaggctgtgccccctttggcctggctccaatttctaggggctctgagcctctgtggcttctattcccctcacctggacagctcctaattctcttcgcagttaagctctgttcattcaaacatccatgagagggcttttcctgacctccattccctttcagggctgtccttggcattgttgcctgctgataattgggagactctcagtcttttccccatctctaactcaaaatcacagcctaaggttcagtttatattaagaaaaaaagtaattttatttaatgaaggaaaaattgggtggataaataaacagttgaatccaaaggacaagatggtggaggatattccacatcctggtgggagactctgcagagcacaaggatgggagccattctgtggtgtgagggctttcagaaagcaacccctgtctcagcagagctacagcagttaacaggaacactgtctaacttcagtgtggtggcaggcagtgtttgtagcaaggagaaataagtgtctgtcagggtggcaccacactagagaataggacaagatactttcctatgtgagcctatcaagcagtggtcaaggaaggaacccacaagtcgaaaagcaggttgcagtctggggatgactgatgatgctcagctgctaaaatgtgtggcactcacttttctgaggctcacttttccactctgccaaacccaaagtaggatattgcttagcaataccaccaagcgtgcccaatctccctgggttcattaattcaccatccctagtcatcttaaccctgagtataatgaatgttttcattttagttctggtaagtgctcattttggaagttatttttcctctatgtctcagagtgtgagttcacagaagataacaagcatatgacccagacaagccaagaagatcatctcattcatagctctacacaaatcaggtgatcaaaaataggagtgaatctcaactaaggctcaccagagtttccccctagttaaactttctatgaatatattaacaaatcagatgagaaaggcctggctttactggcttcatccttgattctacagggcctctatcttgggttttttaatgtgctcactccctcatttttgcttaagttaatgcatttggttcttgctacctgatcataaaaatacactctattgactattacctacccccaaaaaaagtcattaaaagcactgactatttgattgatgctttctaggcctgtcttctcagcacaagtgtgtcctttccatggcagtgtgcctgtgtttagaagtctcatgtacgtgatgaggaaaatattattagaggaaagtctgagcacctcctaagaatttatattttctaaaatcctaaaggtcactactgtcttaatttatgccagaaacatggatttggggctgaatcatgcatgaagtcatcattccatccctcaacaaaatgctctttcaaagctaggtctggtggcacacaccttccaaggctaaggaaggagaattggggaacaaaggccaagtacccttgctcatggtgtccataaagaacaaaattcttccagtaacactaggaccaaggagtatcagtaatcctatcttgtagataagaaaactaaagtggagagaggttagtagtgttccacagttcacacagctaactggaggcagagattgcatttaagagtgaatgagcattaatcagaagtcaagagaggaagaaatctccattggatggatggagtgttttgggaagacaccccagttagcagggtatgaggcaattctcatgaagaaaatgaaaagaagccactgaaagtatcctgaggcaggagaggaggattatctaggggcctggatcacaaaactcagatcagtacctgaccttaagcagtgccttgttagggacccaccatcgattacaaatcaatgcatccaggcatgcagtagatgcttattaaagagtgctcttacatgtggagagtaattggcattaagaccaagaggaaaattgggatttcattttagaatctctttgtaggaagactagaacctcaactagaagactttggaacaagcagatcagttccaagcactcattctagcagtaatgagctgtgtgaccatagggaattactcaaaatctctgaaatcctctttccttatctataaaagggggacaatggcatctttatcatgggttatttcaagtcctaaactgtataatgtacccttatatctcccatatatacagaataaccagaattggcaggctaaagaattcataaatcatcatggaaaaagccatgactccattgaagagaagatcaaggatgcattcacccaaaactaacacatgcaggtagaatgaaaagagacgcatgcagacagttcaatgaaccattgcaattatttaactattagataagtgtgtgattcttgctagtggctctagaaacagcaaggaaatccagaagactctcagatgaagcaatcctctataatttctccctatacaatatactgaactaggattccaatatattagaaactagtataagtaatgctgaaacctcatcttaaccattaatattaactgacaaattcctttcaaacaaagacaaatcaaaatccacaaataaggcaagaccctgcgcaaatgttaatatgcagtgcgctaggtcagctttcctgcccctggctcttttacttcaataggatcagcatttacactattcatacctccactgcaagcaagagtgtggtaatttgtatcttgtcaaacaaatttgaggcacctgtatctgtatagtgaaagattattttaggaggttttatggacttttttttaattactggtttggaagcaaaagaaaaaaatcttgaagcctgaaacagtgggtgagattcacgtctatgaagttcatatactgtagtttgggactgcctgctgcagcaatgtcaccataattacacctgtcaaaagctaacaatgagtcctgtgtgtgactcgtttgtcttccttttagagattcttcaatctcagacatgagttaatcattgaatgggctaatttgctggcatgagcagttcctacaagcaactcagtgaaaccctggtaagaaccatccataggttctgaagccttccaagagtactcaaagtgcagccttttcagcatgagcattagctccaagcaggaagctaccagtgtagtgaacaagccaggatgccctgtgtggccaaaaccccaaacaaaactcattttctgtgggccttcctatcaaatactgctgttgttcagacagaactaatttggttttttggggttttttgtttttgtttttgtttttttcagaaccatagatgtagaccaagaattacgataagggtaagaagttttatcttcccatagagaagccttcctcaatatttgtggtagctgctgttaccaattagcatccttggcagaggtgggcaaactcccactgaaagtatcatctccatgcatttgaattggaggaactcatcagtgtcattgtagccaacttgagctaagctctccaagcagaggtgaagggactgttcctcttcccacttcctttacaatataaacacaatctcatcaccttccccatagatgcctacccactcttatggatgagtaaaatgacacctaatatcttcagggacctttaatgtttacttttaaaaaaattttttccatctctagcattgcattcaaatttattggagaacaaaataaggcagaagagtggcctgctgggcataagggagaaagtgccaatctaataaaggttgacttagactgaaaacataaccaagtcagattattggtagtctataaaaagacacttacttcatgttctcaaacactactcctctaaaagcatgaacgtttcacattaaacttttaaacaagttttccagtggtaaatgaaatcacactttaacagcttcagtctcaaatgaagtgtccagaccagatcattgagctgcctaagtggacagcatggtgggacctcattcaggtatttctctggcatgggattcatgtgtttgaggcagtgttgaatccacagtgggcccatgtttgtctggagtgatgatggccctggcagtctgtaggatctgctgtggttcccacaaagatcttgtggctggaggccagaagggcatcgtgactgatccagtgaagatgtttcaagtgttcttcaaacatttagttaaaagaattgtaaaacaaaacaaaaccatatacttctaatacatggttaagaacatataggcagtagtcattgcaggtgccattcaaatgtgttgtgtgggatccaagaaagctttttttaaatgttggagctgaagatttcataaccatagcttagagaatatatgtcacacaatctgatctgaaacagtggccttgtcaagttcacaaagcaaaccaggtttatgttccagtcccaaagtcttgtttaatttttcactctaaatgactgtattaatacaaatctctgtgacaactgtctcacttctaaactccagttataagacagaaaggacagagaaaccataggatattaccatgttttggtttggcttgtagggatttctattttattttttctgtcaccttctatctcacagagcttccatgcagctgccttggacaggatgagctgtggactgctactatcatacaatcccttaaagtcttcaggattaccagatatctattcaacaggtatcacacaacctggacccaagcactccaggcaatagttttaaatgataaacatgcagccagtagtctaaaagacaaagctgttccagtcaattaggaatccaccatttcaacttccagctttctacactggcacctatatggctgtagtggtttgaaagcaaatggcccccagaaggaatggcactattgggaggtgtggccttgttggaggaagtgtgtcactgtggagggaggctttgagatctcatatgtactcaaaccatgcccagtgaaacaattcacttcctgttacctttggatccagatgtagaattctctaacaccatgcctgtcttcatgctgccagattcccagctgccatcctccctgccatgatggcaatggactaaacctctgaaactgtaagccgtcaccttaattgaatgttttccttttgagtttctgtggtcatggtgtcctttcacagcaacagaaaccctaagtaagacaatggtcatagctaaactgatatgctctttagtaccagtgaatgaggcaacttctttgaaactcattttcaatctctgtgattgctattgccaggtttgttttttgtttttgtttttgtttttgtttttgtttttgcctatacattttcagttgtccctccatataacatatccacttctggctattcatcagggtgaaatgtttgtcctctgtctgtaaaatagaagtatgactccatggtgcacttttgtccaaaacaaccttagtttacaactgttgccctggcatgagtaacagttacctcactcactcaaaaaagtggtggtggcggcacacacttttaatcccagcactcaggaggcagagaaggtggatctttgtgaattcgaggccagcctggtttgctacaaagcaagttccaggatgggctccaaagctatacagagaaaccctgtctcaaaaaaaaaaaaaaaaaaaaaaaaaaaaaaaaaaaaaaaaaaccaaaaacagaaggaggaggaggaggaggaagaggaagaggaaaaggatagttcagatgtataaaaaagagagggaaatgatgaaggcaggaatggagacagaatgcctcatatactagattaggggaagtgctgataccctggcattatgctgaccctggcccctgacaactgacattcaggcagctactcagacagctcaaagggtgctgccttgcatggatgcctaagggctctgtatgcatgtgcaagctttcccttttaagcaagtgccttctgcctgttctctcttcatttctgctcccggtcgctgatgctaacccttctcttcatttgccttatcaataaactccatgtgggttttgtggtttgtgtttcatggcctggagctgcagcaaacaacaacaggaaggacatatggatgctgagagtgaagagtaccttcttgcacctccagttctgagtgatcccaaaatggagaaacttgaaacattgttcaccatgaaccaaacttttgctatgaaatttcaaaattcatagggggggcttaagcatatagatgggtcataactattgcctaagcaaatagcatagccacaacaagtgacattaacttagttgctgtctttcccgagatgaaataatacccagacacacttactagaacccaagattcacaggctttttttctgggccctaatatcttctcatcattgctacatacaatgatgacacatgtcttttagcatcagctaggcaaagtccacaaccagaacccacttgacctacacatctagaggtcagggagtaccagcagagtgtgcaagacacaagaccccaaatgtggagagaatgccagtatcactgagtgtcgatgcctaaagaagtactaggagaccaaaccaacccaggattacagctgctttatattataacacagagaaagatgagatgatgactaccaatggcaacttcagatctggaagagtcttccattccctacaacccattagaactgtatgcatattgccacaggcctcataccacagaacatttcttctgcctatgactgaacaagtaaagtgcatatacctctccctgccctcctcagcagccacaagcatacactctagagaaaggaacagcagtgaagccagaaggggggaggaaagaagagaagagttggggaggagaagggagaggaaataatgggaggatccagaaaagatagcactcaggtgtaatcttcaagaactagcaccattagctggagacctcctattaaaatttggggattgtcctatttatctttaactgtcaacttgccacagcctggacccacctgtgaagggagtctcaactgagggacagcccacattatattggtttatggacatccagtggggggttgtcttgattcttaattatgtaggagggcttagctcactgtaggtagcactgttccctggcaggagcctgggcgagtgaactagaaagcaggatttctccatggcttctgctctgcccctttggctatgagtcctctcttagaggtaatgctgtatggaagagcaggcagtactacctctaggttgctgccttacgtcctaccctgacttccctcaatgatggatgtgaaccagaagtgtaagataaaagaaacctttttctctcttgagttgctttgtttatcacaacaacataagggaaactagaacaggggactttcatattcaagccataatagtgattgaattggttaatgcaagactggagagaaagaacagctataaattggttcctcctaaaatatctaaggtcataaaaacatagtcaagcaaggatgaaacagtgagatactggaaatggctatctagttattctttccataacagcaattttacacagtcctctgacttatacttaaaaatgaaaacacctacatatgtgttattagaatatccctatctcatgaaccccaaaccctgagtaggaagaaaggatcatatatgctgtaccagatgatacaaatgtccagtttgtgtactacataactctaggtattgtcatttacatttataggacaatccctcaccatacagaattgtgcagtacaaaatctgcacaaggatacatgttggtgagggccatgaaacccacaccttcctaaaacacaacaggatcatgtcgtactcatttcacactaactcttaggaacaatgtttaagttttagtttttacttttctttcaaactgatagtgtaaagttgaggcctatgagtcaaaagaaagaaagaaaaaagaaaacggaaggaaggaaggaaggaaggaaggaaggaaggaagggagagatggagacggcaaccattaactaacacatccagccatctaggaaagtctaggagagttttagacataagcatatggggttatgtctgctcatactggagtcctgacttattcatgcaaataatttttatcccaataaaatgactgccagatatatgtattgtatgtccgcctttcctcctgatacattttaccttcttgcctttagcctaaaggactccaagaatgtctacatacctgaatcaaaccttaaccctaccccagtctgccccacctccaaatttatgagccgctttcctgtctatctcagccacaaacataggacccaatgaatgcatggtaaaagatttgaagcccaagaaaaataaagatagcctccaaagaaaaaaattattaaattacagcaaccacacaggtgcagctaccagaagagcaggctgtgaagttttaggggggcgattcttcttcgcacctatttgcaagactacattgtaatacaatcgcaccttctccagtttgctctcccccatctcagtgtgaaagcttgcagctccataaggcaactctccacatacaatcaaagctatatttgctctcaacgaaaaaaaatcccagcaactgatttttcattagaaagaactaataaattaaaattgtctgctgatcattcttggcatactctctgactctgtgcatgaatttatataattatatagcctctggttattaaagaaaaacttattttacatgaaatcctgttatagcttcatgctggtagaaaattgtgattcttcttgaaatccaacaaatatttcaaaccactgtattttaaatgtctttaatttcactctacttaacttcctaattgcatggctgaagccttaattccatttgattttacttcaatatttatattaggtagtctatggcactctgggatcaggaaaaggcagtctgttgttgaaaatttagatataacttctatacatttgcatactgagagaagtttaaagaccagattcaatgagaacaagattggggatgaatggcaaatggattctccatgactcctgattgtgtgtgtgtatatatatgtatatatgtatatatatatatatatatatatatatgtatgtatgtagagagagagagagagagagagagagagagagatcacaaagtcaaaaagcaagcacatttgccatataactgtatctcctggtacttactaatatcacacagaaaggggttgtgtatcaaaggtgtgcacaataccgtggagcaagccctgtctatacatatgactgacttaactcccaagacagaaaaatagtcacatactaaagtgttaagaggagaattggaatctttaccatgtctatgtggccagcactatacatctacccagagacaagtaaaatttaaccattattcaaaacattaaggttcatgatagaccacatgcagacaataatgagcatagcttgagaaatgaccaatgggagacacaagcagaatgtacaatctttgggagaatgaaagttacaggcgctcattggctgggatttctgggacaaccacccacagcacatcccatgagcagcagtaatagcagatctgctgtcttgggtgaggggtagttgaataccttctgtgtttggacatggtttgcccagaaggctttttaaaaaagagttctccagatcaccatctgggtgaaccccaagtattgatggttttttaaaaagtgcccttgtgattggaagttgcttccagagttgacacactaccatagaataattatttcaaactatggtcaaaaatactggtgaacacacaaaagggtagggaggttttcaaacaaaataatttttcccccagttttcaaataggagcaatggtaatgactgaaacatttactagcttaaaacacaacatattttctcaacctctgttgaatgttacagtttaattatagaaaaatctagtaaggaataatgtgagactgagttccatatgtatatgtaatgatttccaattgtttcattactaacatgcaatgtcacaaagaactccataatgtttaggttttaagctacaggaacaagtttaggaatcatttgtgtagcatccctaggcacagcctgaaaagatgagcttcaagaaaaagatgtaagaatggagagaaggattggatgtatatgaaacatgaaaagaatgttccaaagccagcccttattattctcaagaaaattactaacagcatattaaaagcacagtggctgggaagatggctcatttagaaaatataagcgtgagaacctcaactcaaatctctagcacccacataaaagacagacgcagcagtgaacatttgtgattctgtttgtagctaggagtatagacagtggattcctgaagctcactggcttgccagtctatcagaaccaatgagttttttcctggtcagtgaaagacactgttccaaagaatgaagtaaagagttatcaaggaagacacatgacatcactgtgtagcattcatatgaatatacacacaatttcacatgtgtgggcattcatgtgcaagtgcacacatgcatacatgaacaaattcagggggaaattttttgcttacctttctaaagagaattttctataaggtacttcataatttacttgatttattaagaactcattaaggaattctcattatgagataagcctaaaaggcaataggattgtgttactgggtggcttggctgctaaaatatttgatttattcatggaagcacatataggactaaacctgcttctatcctcactgtcttgaagtcaattacagaatgtaccatttctataagcataataccaaagtgacagtttctctttgaccccgatggtgtgtgtagctgatgaaaaatgtcatccttactgataaaaaataattcagatgagaaatgtgcaataagagcagtagcttcacaaaggtaagcaagggtgtgacaaggaacacacatggtccacccatgccattgcatcttgctgaagtctccactcttttatacctgaggaatgtcaaccttcttcttgtggttatatgtggtgggtatcactggtaaatgtggaactttttgttccagtgaatgccactaaagggatcattctccttctttcctttcaggtaatgaaaaagtcagagtcccgctttactgaactttggagtaggacatttggttgtcatgttgctcaaatgctctgtattggatgttcagtagtgaagagcttttgcccacaaagtgattattaccaatgcctgctttccagagatacaaaggccttttaaactcctaggtacataaataatctttcagaaaagtaatattgtaatatcttatgcaacttctccatatcttcttaatatctaggtgctcttgttttgttttgtgtcatggtttttaattcaattttcattgaaattacatttgcaattttaatgcaataactggctggggatgtagttcaactctagagtatatatctagtatgcatgaggccttaggttcaatacccagaagcttccccctcccacagatagacagatgacaggtagatgatagatagatagatagatagatagatagatagatagatagatagatagattataagtaggtgatagatgataaatacttaacagagaggaagagaaaaatcaaagaacgttgctggtcaggctacttcagtcacatagttcaaattatatgctaaccactcttttcacaaatgtagatgattctatacagatgaatgtcataaatgcacatttttctactgttaaagtgtaaaatttgatgaattgcaatgaaattattcactaaatgatcactctaaagtttgtgttagaaagcatatgttaaagaaattaacagtttcccattaatacatgagttccctgggaccactcaccccaaacttcccttagttacaagaagataccctttccaggtttccttctgaacttccctgaggtctgatggcactaggccatcttccagtggtttcaggtctcagctagttcccaatgccaatcaagtgtaaatgcctcacctggaccactcttaaagaggctcccttcttacctttcctctgatgctgatttgctaatttgagctccagagaattgtctctgaaagaaatgatggagcagaaccaatgcccacatctttccaggtcagaaagacacacaggatcactgggactcagagccattctctgctgtactttcatgaaatccaaaccatcctttctgaacctatgacattcttgcctgatcttaaaagcctctgcaccacctccaaagctatttgcttaatggccctgagtctctaaagatatacaaacttgttgaacattgttagaggtattggatcaaaatcccaggttgatttcactgccatttgtatagaaatcataaaacaagaatacagaaaggcaagattccaaacccacaaactagagttaaattccatccagagagatggttcagtagataaaaggatttgctgcacaaacccaataacctaagtttgattccaggatcctgtagtggaaggaaaatatcgactcttgaaagtcatcctctaacatccacactgtctgcatgcaagcacgcatgtacacacacacacaaaaaaattataacaataaataaataaacttctcattcgatattgtaagtgtagggatatatgtagttgtgagctattggagacccatgatcaagacaaatgttcttaactggcctcccaaattcctattagaaactgtcccctcacatacctctcaatgatccatgtgcctatggtttaagtcatgcacctgactttacttagcagattttttttatttccaatggtatttgtataataccttttttaaacaatcttattttacattccaatcccagttccctctcccccaatccttccactacccccaccatctctgcaccccaccctacatccactcctcagagaaggtgtggcctcccatggggattcatcaaaatctgtcatatcatttggggcaggacaaaagtttccccctctctgtatctaggctaagcaaggtatccctcaatggggaatgggctccaaaaagccagttcatgccctatgaataattactggctccatagtggtctcatagactgcccaagccccacaactaacacccacattcagagggcctagttagatcttatgcaggttccccagctgtcagtctgtagtcactgagttcccacttgctcaggttcaatacttatcagattttaatagttcattcttcttctagacattggatatcttattgtctttagcaggatgccaagttggtagtcgaaagctatgtttccttttagaatgcttggatatttaaccatccagttggttagtgaaaaatctcctcagctcaacatgatggtggcacatgcttaaagtaggtggagacaagtcagtagggccacacactgagttccagagcagcctgggctccatagtgagagcccttagtggtctgatgtggtaatgcacttggaaggcagaggcagacttccagaccagtctagtctacacaatgagttctaggccaaccagttatgtggaaagagtctgtctcaagaactacaagcaaaataacattaaagagtttcttagaacaacttaaagttgaaaaattaaaacacgggcatgaataactaacttatataattagattttgccattcattcacatatatatgatataaattgtaagtcctgaggcatcttcctcatattgtagtattgtatcacctagcttatctttaagaatatgttttaaattgccatttctgggctggggattatcaggcacttgcccagcacacaggaggctctgagttcaatctttacaactgcaaaaagaaagaaagaaagaaagaaagaaagaaagaaagaaagaaagaaagaaagaaagaaagagaagggagagagaaagaaagaaagaaagaaagaaagaaagaaagtaagtaagaaagaagtaagaaagaagggagagagaaagaaaggaagaaagaaaagaaataaattgccgtttttaaatatgaaaatggtgacaatgatattgaagagcttacctcttatttttaaactcataaagagccttgaaatttttcatccacagctagaatacccacctttaggagtactaaacaattctaggtaagttttagcatgtgtcaactttgcctgcagcagagttgggggaaaccaaattcctagttaatacagttttaaccacccatggaagaagaaggagaaggagaagaagaagaagaagaagaagaagaagaagaagaagaagaagaagaagaagaagaagaagaagaagaagaagaagaagaagaagaagaagaagtgagagaaagtacaagcacaaatgaggcagagaggtatactccacagcatctgaaacaagaacaggaactgatgggtcctgttacccctcaaacaatggcagagtttttctaaggatggcagtgatctcaaccccccctccagaagttctgactgccttcttctggataaacacagcaggtcaggcagcaaaatgaaccgagcaagaggaagcccacataaatcacaagtttaaaatcagtccaaatggccaccttataaaaaaaacagggatgtcttaatacatagctccagccatcatatttgcataaattccatgaaatggcgaattgggactgacacgcaaaaagcataaagtgggcctggagaaaacagtagcggtagtttggcagattaccctagatccatccaacgttttctgctggaaattaataaactctaaaggaagggtcgtcgaaatcatctgctcaaatggcacccagaaaacagtttgcctgtgaaagtagcattgcttcaacaacattgctgttttttttgttttttgcttttttgccaaactgtcaatcagaactggcatgcttccccacttgccaatttgtcggtttcctactggcaattctcctgctgtctacacagggctttgttggtaaatcttagcacacatctactgtggccaaagggcctagcatggatccggaagtgaaaacacgcccaaatctgcacatactatgaagtttctcgacacaattccaatcctttgaagaatgcaagcctgagagttttctcctgccctttgaagactcactctaaagcaaaagatatccttggcttgtgttttattttcctgtcctaaaaccaaagtaaactgttattttaagcaatgataccccaaccaacttgacttagaacagttcctgttatgagctctctgatccactgttttcaaatagctgcactttggatcactgcacacctgcaagtgctgctttagtagacgcttggagacttgcaggtgaggacccggcacccccccacccttggttctgtaaggaagaacacagtcatcacaacagctggagtgagcagcaggctgccgacctctggccctgtgcacttactctaggccactatcaacaaactgccccccctctgtgaacagtttgcaagaagcaagtcaacttacttcacccaagcttgggttgttatggtattcaaccaaaggtgctcttgctctcggctatgcttatgtaacttcaattttagacaaaaattccagttgagaataaaggctcaaagataatgaccatagcccaaacatttgaaatgggttgaccattcctttgtttcagagaatatggaatctctagaaggaggagctttttgtcaactgcttcagtaattactaggctcggtggaaatttcctgaagttggctagtgtgcaactgatagcataagacttaagttttcaacacacacacacacacacacacacacacacacacacacacacacacacacacacacacacggggggggggcgcacagaggcacaggggacaaagactgtgtatcttggtccatgttcaacacgattattcttcaacattatgggtgactgattaaacactcacttcctgaacatagttttcctcatcaaatacctaacacacctctgattttgatgaaccattttattcctttaacattttaaaagggcataactagagttccaaaataaaatagtcaaatggctagatcagtgtgtgatgctctttactgagcaaagctctaattaatttttttatatactctccttaaaatcagtttcttgcttacagatctacaggccatctccataactatttaattaaattttataagctatgtatcagggctggggagatagctcagtctgtaatgtgcttgtcatacgagcagtgaggacttggtttaatctccagaacccaagtgaaaagccaggtggtgtgcacttgcaatcacagcactggggagttagagacacgaagagcagcatagcctgatttgggaataagaggccaataagagatgtctctaaacaaaaacaaacaaacaacaaaggtaaacagtgcctgaggaggcgtgacaccaagttgccctctggcttctatagacacatgtatacatacacacatgtattcacaagggcttatatatgtacatatgcacacatcacatatatacacaacacgcacacacaaacctatatatcgaacaagaaatctaactacttcccagggttttactttatttttaatttacaatccctgatttaaacttgatgaacatcccagcaatttgtgtagatacagagccaggcaggtttgtttccttaattgctttctctactgcatacacatttcacactcagtgctttcgaaccaaggctctcataatgctgctgctgaccttttaaagcactggcataaacacagaaatggcgatggacctagagaaagcattgggtgtgttccaaaacacttaaaagtcacaactgctgctgtcgggacttgtcgtgtacattgtcttgatatcacattttaatagaatgaataagtttgccaatgacacacaaagaatagaattatataaacataaaagctctcttcaaactaaaatctcgttcaaatgaccagaaaaggcccgatgatatagggaatgcctcatgcacatcttccagtgatttaaaacctgctgatgcctcaaagaaatatctagagcaatattgtgcttggagggggttttattttatttttcatttcacactgcatccatctggaacaaatctccctgggtgtattacatcttgaaaacactatgaaaaacattcattggaccttccccccactccccagatcacataaccctggctgcccagcatatcccgacccggatcaggtcgggggcactgctgaggtgatgagagttgtttcaggtgtggcttctggcactgcagctccaggaagggagaatatctgaatgagctcgccatcccactggccttcccagtgtacctaagcagtgtgccaagccaggaggtggctgtttgactcaaaaggaaactggtgctattggtgtctcttaacagttaccctcaccatgttcaaaagagtcaaaaaaaggcaagggaaattccagtcacactattggtaagcaaacaaatacaaaacttattttagtgttttttcctagttaaagttaaccttcattggatccctaaaattttatcacaaaattcttttttagataataaaaagtataatttaaatcacagtccctcagcatcaccatccagaagatgttcagactgttttcctttgggtactgtttaaatgtatctgttctggaatggaattacattatatgtcaattttcaaaagttggtccaaggcacagccatgtggataaaagggtactgaggatcccaggtctcatctctgctcatgagtgctgatcaaatgctttcttgggtctattgtgggggagacagactaacttgcacagctttgttgctacctcctagagccacaaaatacttaacaccacctcagttgtactggtttccccaagaattcttcctccttagcctccttaatctgtcagggtttatcatgatgataaaacaaggctaccactagcatgtataagggctctgtatgaggaacacacacacacacacacacacacagagagagagagagagagagagagagagagagagagagagagagagagagagagagactttcaggtctattccttttggattagcacaaacaggataccctgaactcaggtagccctgtctaaatcccttaactcatggcatggctaccaagttcttcctctccttaggtacctgaagaacacaccaggctgtggaagccattgtccttgtccatcttccatcttcttccagagctgtttatgcagcctatcatctatggccaatttagaaaggggagttcttatatctaggagaagctaatagtacttagccagtgtgtggaaattcagtctgcctttaacataaactgtaagcatgcggcttaggcaagggaagcctcagaaaagtatgaattggatttcctcttttattcaaacctcaagccacatataggtactagacaaaaaaaaatttttttttcagggatagacaacatattgactacaatactagcctttggaaatatttcaagttacaatttttaatacggcttccttcctaaggcaggaaccctggagtttggaactgttagcaagatgctattttaaattcataaccaatagatttttaatccatcatcccctcctgattgtataacctatttgaaaacacagaccagaactggaagtatcttgataattttaaacaagctcaataatcctgttgtttgtaaatacacaaatatgtagagtccctttgtggataaaagttctaatgaatttcaggcgatactctttataatgtattttcttggtgtattaatggcttattgagtacattaaatgaaactgttggattctgtctgcaccaactataataaattttgagtaattatcattaaaattaagacaaagtcgtagaagtcatccaaggagcccctttttccatttccagagttaggcaccctatcctgaggaagtaagtctgccccgtttggggaaaaagagaaccaatattttcaatactcaaaacacattcgactaaagtaaatttgaaggatctatataatataaaatgaacttttaaataccaacaagaggatagttaaaagaactatagtttatctatctaatacaatgttctgcagtcactaataatggccaacaattctggaaaataatgttttacataatctaatgcacaatacaacttgtacatgttactgtaatttttaaaggacatgtaatctatactaataaatactacaattactttgataaagtagacttttaaatcagatgtttagtgaaaataatttacaaatattagagaatttatttgaataatttttaagagagaaagaagcttaaattgacaacaaaataataaagtttggggcattttataaagaaggcagaaaatgtatagtatctttctaacaatcaaaccacatagctatcaccaagtaaaaaatgtttgtaaccttcaaattttgtgagaagggaacaaataaaaataacttttgcagtgaacaactataggccatcttgaaagtttgatttccagaaatcctacacatgaagttataaaattagtgggagtttctatgattaataccatttccagaattgagcagcactttgtgtgggttcactgtgtagaacaaactgttgcataatacaggaaaaaagtattagtcttctttcaactgtgtgtgttcccttctacctgagaaccgactaatgcaatacttcagtaatttgacaagatcaccttgagactgggcctcatatttgaaccagcaacttatatgaagtttggtaagcaatctggtttgaacatgaaataaaaacctaccttttgggaatcctgtcctcaaacctacctttttacagaagcaacatgtcaagaaataagaaaatcaaaatcttgtatcattagaaaaaatgcatcaaggagaacaggacttagtggaaggaaagattgatatccaggatgagctgtaatttagaattattctcttgccgtcatcagtgtttgatgtttaacctttatacatttttaattcaagagcctcggccacactcactttatctttcattttaagccccttaaacacagtcaaaagaaaatccaaacttgaccaatagctaagtattaaacattctcaatgacatttgtaaattaaagcaacagtaggtaaaaattaatttttgcagttatgaaatgaagtaaccaaaagtgaccatttggataacacacaaattctcagaacaaccaaatagatttcattctatgtacaaatatcatgaacaataccaaaatgaattctaggtcatctttgcttgcttagttgaagtcgtgtagcattttgaaaattgctacatctacgtagagaaaatccatcaagaggtcatttaaaacatgtcaaataaaacaaagtgtgagccatatacaaccattctagtgataagttcagatcaaaataaaaaatgaaatttcaactttgtctgtgttgttataattttaactatgcctaagttcagaagatttaatattcaaatattacaatccactttctccattacactctacgatgtgatttcacattcttttgtaagtataaagaaaaaaatgagacaattagtaactccctgataatgcactaatagaaataataaatgcaactttttttttgctccaatcagttgtggtctaagctctccatcatgatgtacattaaaatgttacttatgtcacatccatattttagagataatttcaaactttggagctaaggttaggcttaatttctttccatgtactaagattatcaaatatttcagactatatctttcttctccaagaaactgacagtttataaacaattgccccaattaccatatcactctattttaataaatgcttggtgagtatgcacctttctcgtcactaaaatacaacctcggggctctctgtactgacatctcctcagggtgatcaacaatctggccacttaatgagctttacagggaactctcacaattcagtctagtttaatagacataatcctcattttcaacttccttctaaagtttgctaacagatctccatcaaggatcaagccaggaagaacagtctgacatcctcaactggaaatgcccctttgatcttccacacaacttaacagctgcatttctgtacgcttaagagaaacatgaaactcaccagatttgattgtttgtttttcatttgggcagccttcaaacagatgagcctcaatgactccagctgtctcctcactccattctgccaaaacccggaaggtgcgacaggtgcagagagagcagcagccagccgtgctgtccaggaggactgagagggaggacggccagctcagggcagtgcagagcagggaggggagcctgctacaggttgcagtgattggcttcagcagttgctttccagctttgcctccagtaggtggtaagtttgcagatgacgactaactctgtgctcctctggctgactcagaaggagccccagtgcccctatgtcaactgaaagtggggaggggggctatcattggtaatgaatctttcatctggtcacatcaactatcatgtaaagcaaaggaagtcatgtctttgtggccttccttttttccttggtttccttactggatgataattgacaacttcaccctacactgtctgtgaaacgcattgattattaatacttgcatgaaacatttcctgacccaggtcctatttatagcctaagtctcctttgtttacagcgcccttgtgggatcaggagggaggctaccatttaccctgcacagcatggggcttgcctctccaaggctcattactcgcattaaatatgaaatgacctgttcccaatggtaaccaagcaattggtagctccattgtccttcccttccttgttcaccaatgattggggagggcagttaaggtgaaccaggtgtagagctgctcctggtggtgacaagcaggtgccgcttctgaggtggcatcctcaccaggggaatgtactgatcctctctggagatgcccaggtttgctcttttctccacaccatgtagagctctagaagcagtcaggagtccaggcaacccatctttcaccttcctgatagtgttcaagaatgtggaatacccatttcttcttttcctgaccttagtcatgtctttcttttctgttttaagatggaattgctggtgtgtgatgacaatctgcagaaaggctttctcaagtacgtccctcaactgcttcttattctcctgattcttcattctgaaaccaaggatactggttttaccaacttctaaaatgtgtggagaattatgcagtgatgtcaacaataaattaattaatgaactaaatgcctgaccacttaaaagaacatgtcaataatacacaatatatttggttgactcaaagctccttatgagaatgtgtacacttggtgtacacattcgccaggaagttcctgtgggaaaaccttaaagaggtactcctttccttcatcaggtcactgaagcaccaaaagttttgtggcttatgtgatgccccagggtaagttcactagtgcacagggaagctcccaggtttcctattgtctacagctctgttcttttgagaagccctttgtactatgtactattatatttgtttcccattgttgcataactcatcctcaaaagtccagtgtcttaaaacaacatgcatttgttctgctctcccacttgcaggagccagggtcccagtatggccactgctcagaaacttgcctgactactgtccctttgtggaggtcaggatcttttcacttgtggctactggcaggatttcatttttgaaattgtgggactgaggtcaccagttttgttgcttattgtcagtcagcaaccactctcaattagtagggtcactcagagtttctcaccatgtggtcctgtcataccatggaagcatgctctttcacacagccaacaaaacaacttactcacactgctaaggatcgtgtctaacatatttactcctgtgtctatcaccacattatcttggccacagtctaaaatgtgtagatagatagatagatagatagatagatagatagatagatagatagatagatgctttgccagcattttggaagatgagatttgtctaagaccatgaataattataccttaagtacacattaaagaaagtatgggttgtaacagcccaccccttctgaataccaaatgctaaaagatgaactgtcactcctttctgtttaacagctgtttttttttttctcttccttttgtttcttgaagctatgagacatttttcttagtgttgctctgcttgtttctttatcattcagaccaaggaaactgtggctatggtctatctagatccaaggctaccctacctaaaacacaaggcagctcccaaaaccacctcctcttttggcatacatgagaagtacccagatgccttccacaatgggttttgaccatggttcagccatccaccagctgtgtgatattggatgaactgcttgaagtttcttcacctatgaaatgtagatgaagagcctatcaacagatacacactaacagggcctcaggaagtgtttcataaagccttttcctcaggaaagcatttggcttttgtccatgagatttattgacatgatttttaacttcaatagatggaaggctataaatgatattcacactgggttttttttaaccagtgttaatgtctttgagccataacctgtcagatttgtgttctgctgaatttggaggtctttagttgaatatatatatatatatatatatatatatatatcagttcatatatatatcagttcatatgcacctctctttcttctttctctctgtgtggtcattctatagagccttaggctgcctgtaggttgggtctaagctttggattataatcattgtttggtacattaagataacacattttcacattacagaacttctttgaatataacacaaatacagagtaagttattattacaaaagtaggagactaaataaatcaaatgtttttccagctgtgacccacctcccttttttaaaatactgtgttttttattaaaaatattctattacagtccccctcaccccttccagttcctccccacctcccctcccacctggatccacatccttcctgtccctcactagaaaacaaacagacatctaggaaatgataataaaacaacacaaggtaaatcaaaaacaatttgggatatgacaaaacaaccaaacaagaaaaagagccatagaaaaaagcacaagaaatgcaaatagatgcagagacatatgtataggaattccccaaaaatcatatatgtgacttataagggggcaaatgccctgacttagcattgtgagacaaagaaactccagtgctgttgacatcgtttgctgttggccatctactgctgtgaatagggcctacccttaagagaggttctttccctagcgagactcccttgaagaaaacaaatactccatttgcaagtgactatcaaatggaattatcttctgggttagggatggggacatatgtctgtatcaggctttttcttttgggccatcaaccaactcggccttaacttagttcttttctggctagcacttttaacttaaattaacctgtttctctttacctttttcttggtgctttttacttttctttctttctgtatgtcttactttcactgcttcttgtgtctggcatttgtctgccttcttaccccagaagtgtcccttgttttttcctctatctctcattcttcttttcttctctctcaaacctagatttctcctatttattctccatacctggcagccctgcctattcctctccagacaaactattggacatttggctttttgttagactaatcagttaaattaggcaggcaaggtgaaacaaatgcaacacatctttacataattaaacaaatgcagcataaacaaaagtaacgccttttcagttaaagtaagagtccacagcataagcaaatgcagcacatacttctctcagttcaagacccacttctcttcttgaatttgccctttccacctccatagctgagccatggtgtgaaggctaattccctgaataagaggagaacagaaactcccccataatcaaaggaaaaggggaaaaagaggaggaggaagaaaggaagtatttagttttgagatgcaaataaatgtttttatatacccaagggaaaaaatatccttcaaagccaaaattctcacggttttccaaaggaaagccaaaggtaaatggaaactgggcatccatgaatgacgtcatagaacagagaagcatcagaggatgtatcaagagggttagcataacatctgtaccaccaaatcaggctccagaccccatttctcaggaccttggctgtgaggatgcaaggacataacagagtcagctgggactagctttctttgaagtgtcctgtaaagagtctaaaatgctcagggcaattcaagatggctatgaaggaccagggtgctgagatgataaagacagcactggtttgcggaccttcgaagccccaagggcacactcagagatgatgctgagacagcagttatgactccttcctaaaggctaagaaaacatgtgaccctccaagaccaggtttgaaataacaggcatgtatagtgtaagagtgttcaggtcaaaggcatgcaggaccttgttgtaccaggagcaccaactgacaccaagtaatcaggcaggtgccaacagaggaacccccatatctaggcaagaaaagtgggacccaagtatctaaagacagccatacaagtacagtccccctcctcgtagcaacagaaaccccagccacactaacattgtctgtcctctccattaaaaaaataaaaacattctattttcttccaaagagactgctaatatgcaagattaagttggaaactagaaacctctcactgtcctacttgagaagacaaataatgcataatctcacactataaagttctacttaagcacatatgagacatgatgtaaatatgtggattgtattaaactggatttcctgctaaggtaccatttcttgttgtggtacttttaaggaatatatcaaaatcgatgtatcactagtagaagtatccactttattctaccgaagtaagacttgtgcttctcccttttagtataattctgaggcagatgactaccttttaaatacttattgatgtattatatatcatatattatataatatatattatataaatatatattatatattttatatattttatataaatatattataactatatatatatattcatatgcctatatgccaagctcttgggtaggtcctgaacctccagtggttatgtgaaagcaattctttcatccttggtgatttttacaatgaaggaagaaagttattgaagcattttgtagttcagtgcagtggtgtttaataatgggaggtcagtttatagagtggagagggccaccaaacaagttttaggaacactggaaactttcatgaagtaaatgagccctcaggcaaactctggggggaaaattagccccttggtagaagagggagttgactctggcaatgaagaccgaagatgcactggctgaagctgtccttaaacaagcattatataaagattgaggagctaatcattttggctatggagtccatgtctactccagatttttctttctaatgacagtcttgagatgacttactaaaaccaaaatgacattctccaggatccaaaaatgttaccctgcatttcataggaaagacttttattctttgtgtgttgcaccaatgcataattctcatgtcttgactagcttgcactcttcaatgcttgcttaaaaatgggatgataatgggcaggaaatcattcaccaagacactcaagaatccacgtccccaggcacgatctataaatatggctgtgagtaatgatatgaatagtgcctaacttcacattttattagtttacttaatgccttagtgttttttctagtccctatagatatagatatatcccccccccattccattcactaaagtagttgggtcatagcaagtgcaagacagcaaaaaggactatagcacagcctaatgttgaacctgtggattatgtcaatcttggtttcaaacaaatgtcaagaagtattattctagcctccaaattttaaatctccagcagtagtagctctgcaagctcacccactctgggttgttctgtggccggtcttaagcaaggtgtttaatccagtcctggggcctcagatgcatttcccccttgtgtttatcaattcacaccatcaagtgaattccagcatgggaaatgggaaattgaataaagcagggcaagagaacactggaccatcctcttggcagctttcagcatcctctcaggaactctctgctcatgtagcatttccaactcaacatagtcttctaactctagcaactccccaacaaccagtgaccctagctctcatcaggtagtcctccacctggcttttcaacattccctcctcccactgtcttctaaagtaactatgtatgacagcttctcacatggtttccagtgttcaaagttgtgggttgaattatgaccccccccaactaaagatatgttgaaatcctaatacccagcaaaaatatggtaaagacctagtttccttcagaggctttgaagagtaactttgctcaaaagttaactctttgcagatgtaatcaagatggggtctttaggttgggtcctaatctaatatgagcatcaacttcatttttaaaaaaaagagggtaatttggacatagtgacatttgtgcacatagaaagaacattgggtgacagaataggcaacctggcatgttccttctacaaactgaagaatgccaagggttgccagccatcaccagaaactgagtgaggcataaaggggactctctctctaagcccccccccaaaaaagctattccttccaacatcctgctcttgaagttctaggctctggaaccaacacagtcactatctgtaaaattctttactatgtggcacttcctttgggtaataattaccctccctgaggttgacttgtttataatcaatagatatggcagaagtggcgggctttgtcactgcagaagaaggacaagatcctgatttcagtgtctctttaattttcacactgtcaggagctacctgacattactcaatgctaccctatggagaggcccacatgctgacacagtaaagctaaccaactactacccaagtgttggggatccttcactctagacgagcactcacgggtaaggctgcagctccagttcgctctcgagagatgctgagtcagagaacttcatgacacccatgcccattttgttctttcaagccatggagtttggggcagtttgttacggcaaaatagataattaaaacaggatgttttcttcataacgttttgattataagaatgtctgctttcgttttccagtttccatcatctatgcaaccagtcttgcattaaatctcctggcttaagctcagaggagtttctgagtctgcctgatacttacacaccagtgtcatatactctggagtacctggataatggagcaaccaacattatccatagacatttaaaatatacagacttcaattgaacattttaatgaaccctccaaataataataaagcagacctcttctttcttataggcagtggcatgaactcatgatagagtgctgattaccacttcaactagtcagaaaaaaaaaatcctcaaataactgccaacaagatagagtcactatttctaataccataccaacatttcaggctcataaatataaaaatgaagccaacatgtattatttatatactgtcacattatgtatggttattaataataactgacattccaccaagtgaattctgaattccagagagtcatggagaagctacatcttaatgacaatagtaactcctttatttaggagattggtcatttctaccctgcaggctttgcaccaacttgcaaaagagacatgtctaaagacagcttatccaaccatcatcactctcactcatttccaagctctcaaacccatacacttcaattcctatgccatctaattacaaatccaaatattgcatttcacattcaggggccacatttagaacacttttctcaaatgtctcttattatcacagagaattaaaaattctcattttctagtaatttccttaagtagcttgttttgaagctccatttccctggaaagggaaaattgaaaatatttatattttgaccaaaaagattaaagagctattcaatgtactgaggtataattgttattgactattctagtttggtttcctgattctgtgataaaaactgactaaaaccaatttagaatggaaggggtttatttgtcttccaggtttcagttcatcctgaagggaagccaaggcagaaacttggaagtagaagctaaagcccatggaaggaatgaggcttattggcttgcttatctatctttctgatacagttaggcccacatgacccaggtggcatcacccacagtggctggaccttcctacatcaattagcaattaagaaaatgcccccagacatgcctcaacctagtggaggtaatcccttaattgaggtttcctcttcccaagtgtgtcaagttgacaagcaagattatccatcacattgatttaattcatctattttaaatcttaattgtatagatctatacacatgatactgtgttcataagaattttcatacaattacatattctcccttgatagtatccaccctcttctctaccctgccttttcacctcccccattagtcttctgtattgccctagacagttccacttttactctcatgtcatttatgataatacgtatctaaaaaaaaaatagggccgggcataggtggtgcatgcctttaatcccagcacttgggaggcagaggcaggtggatctctgtgagttcaaggccagcctggtcttcagagcgagtgccaggataggctccaaagctacacagagaaaccctgtctcaaaaacaaacctaaaaaaataggaactacaaatgaaagaatatatgatatttgtctttctgatactttattcattcataatttgattattgccattgcatccattgcaggattgccattgtattctgaggacagtgtaacctcattcttcattgtgacagaaaacaaccacaatgtatatatgtattacattttctttgtccattactctgttggttctgcaattaagctaatgtgaattcaacttcaatgaaaattgttgagaaagtatatctgtgacatggtgaccacgggtcctgtaagtaactacacaaacatggtacaactggatcttatggtatatctattcttagaggtttaatgctcttataatctttctcccctcccctcttctgcaatgttccctgagccatagaaacaagaactgtgaattctagttgaacttaaagcccactcaataggagggaattcatgtctggtactggaatcctatccagcttcctaagtctaataatttcatggacctaagaaaataacctactactgccactttgctagaccaatgtaattccttggtgttaccatccaggcaaacacaaactttggggacctggcagaggcagaatgttcacccttctatgcatggaaacagtaccctggctctaaacagacacaaaggtctctttaagagacaaactccatccactctcactctctgccctttctctgaggagacaggtcactctgtctctctctctcttctctctttcttcccttctcttactcctttccctttcccaataaagctttccaagtatcctctgtctgcctgacatgtttgtcccaccatgggatccaccaaggtccccctcaagtatcataatacttactatattcagaatcttatccttatccccagggataagggtagccaccacccctcatcaaagcagcctctttttacagccaatggagaccatcacagaagccacagtgtacacaatgcaaagacaaatcataggaagaacatctgcaatggatagatttattttcaagtgttttgaaagacatccatactgatttccatagtggatagactagtctacattctcaccagccgtgaataggaactcctgcttgccacatcctcaccagcatttgtcatttgttttctgaatgattggcattctaactggggtgagatacaagctcaatgtagttttgattgaaacttttttgacagctagtggggttaaatgtttttcgtgtttattggccatttttatatcatcttttgagaaatgtctgtttgattcataagcccatttattgactgggttcttggacttcttggtgctcagttgttttctgtttgtttgtttgtttgttttaggtttttgaggtttttttttttagttccttatatattctagatgatatatgtgtatatatatggaaaatattctctcccattctgcgggctacatcttctttcaatcaactgtttcttttgctataagcaagcctttaattttttatattttatttattttagaacatgtatatgtgtgaacatacatataccacagcatgcacaaaggtcacaggacaacttatgaagtcttttctctccttccaccatgtggatcctgggggtcaaacccagattttcaggtttgccttcacctacaaagtgatagataccttcacctaccaagccatctcaccagccccagatgcctcttaaattatatgtcatttgttggctttatttcctgggtgactagaatctattcatcaaatttacctatatctacatgtctcctccagcagtgtcactttctcattgtatatatatatatatatatatatatatatatatattatatatatattaaggtctttgatccatctggagtagaatttctccagggtgagggctatggacctagttctattcatctacatatacaaatacagttttcctagaaccattgattcaagaaactctgtcttctccaatgtgtatttttggcatttttgtcaaaagttgagtgtctgcagctggtctatgcctgggtctccactctattccattgatctacatgtcgtgccaaactggtgttgtcactggctctgtagtataacttgaaatcagaagtggtgatactgccatcatttttctttttgttcaggattgctttagcaattaatttttatgaataatggtatgggaattatggggactacattgaactgtaagtcacttttggtagtatagccattttaacaatattaactccttcaaaccatgaacacagaagttcccatctcctagtgccatcttcagttgctttctttggtgatttagagattttgttgtggaggtttcttcacttcctggattaagtattccagagtatatttggagatagctgtgagtgggattatttccttgaattctttgtcagtgtgtttcatattggtgtagaggagagctacctattttttgcatatcaattttgaacattgccagtttgctgagagcaagtgtcagatagaatagttctcaggtggagtcttcacagtctcctgtgtcatctgcaaataggaagcaccatctttgcttcttcctttcctactggtatcctaactgttatttccttctctttatttaaggctgtaagtactgtatttaatactaggagagaatggatacactgtaagattacagtaattatcaaacaaagaagccaatcattttttaaatgacaagctttataggaagtaaaggaacactgacagtcccgtgtgcactaatacattagttactgtgggtgtgagtgggaagggggaaagcagaaaagggctgattagtattggatgatgggaagaggtagaggagagcaaagcaaacgcaaggcacaagttagggagattggactaaaatagaataaagatgagacataagtaaatgcagccagataacctataatgatacctcaccaccacacccagctcttgggagactgagacacagagatcctgcaaacccagtccagcccatcttctttgggaaaagcttgcaaagtaaaatgaaaataaaattttcaaaaaggaaaagagaaatgtttcaaatagaagaggagggcatacaaggatgacagtgcaaggcaaagctggcctgctaaactgaaactgagtattaaatgtgaaggcgagggtggtgttagttccaggtgtcctcctctggtctccaaggattcaggatcagtgtcctcactctgcaaagttcagcagaggccaggcccggcattcttgttcatgttccccatcttgcttgtggatgtcagagatgaaaattacttggtccgcattcatccccaaaaggttaccattctaagtccagcccatttggctatgtgccaccacaggtcagctcagaaaaggtccacggaataccctatccactcttcaccagtattctcaaacaaaacaaaactcagggatttttaaccaataagcggctttttgtatactgtgggtgtcagccaacttcaggatgcacttgtgctttgtacatccacatatgaccgttcaagtgtgaatcacagcctagaaatgaatacatgaaacacagctttgacatcactgagattttcattagtggaaaagttatggttaccttcgtggcctttactttcttgtcacacattgtgcatataataaagaggatcaggaaaatctcaatataggaagattcaaattgtgaatgtaaggagatctctgtttaggaacttaagttatctaagcttttctcgtatgcggataaaaagggaagcttggtggtatttaagtgatgaaaagcaactgtgcctgtgtgttttgtcttctcatgtaaaggaagagctacaacaaatgcacgagtaatcaccacagtgcttcagggaagctacagtggtgtagatgagggtagaccattgctaagcatattctttatctgtctcaggagtgatgccacaagaaagaagagcaattctcatctgtaaaatccatactatctccaatggaagttactgtgtgtcccaagaacacacagtcaaaaccaaatgaacatggtcctaggggtcagaccatctatgctcctaatctgcatgttgtcaatttttcatgtctatgcttgagctacttcagaaaattatagttccttcatctgtatggaattataatgatagacatctcacttttgtggctaaattaaataatacatatgtagtacttaatcttcattgctaaaacctgttgtctgtttgacaaaagttattttccaacataaattttacaaagaaaaggcagagtctgataaggttttatctatttacagtaagttgaatgcttaaatcctctgtgaataaggaacataagcagtgaggtggtgaggtgcaccctccctcatcatagtcttatgtggcataataaccaagccacgccactctacggaatttgctcatcataaagaaagaaatgaagattcataagttccatttgtcttaccaagatatcacttctaatgtgacatttccaaaaggtggaaatactgctctagggaagcagatcttttctgggtataagcttcattttgtaaataacactcttgcctcactcatcagtaaatatgtgtgtttgagatggataaatggttcagcagtaaagtgcttgatgcacaaatctgatgatctgagtttggatcaccataacacacatgaagcctgatgctgggagataggaggatacaggagactcttaggccaactatcctggcatacttagcaaagaacaagagacaacctgtctcaaacaagggagaaggcaggagccaatccccaagacttccctctgaggtccacatgtatgatgcaagttcacactcacatatacacatcaacacacacacacacacacacacacacacacacacacacacacacacaacccaaacacatcgacagatactcacatacatacaacaatacacatcaacaaacacagacacatacatcaacacacacacacacacacacacacacacacacaccaacagacacacacatatacacatgcacacagagggagagagtttcatgttgcccaactatcctccaaattagaggtagtcgagattggctttgcactccttatcctcctccttatacctcccaaatgccagaattacaggcatgtatcagcacacttggtttattattctttatttgaaaatatctgagaatgtcctttaatttcatgctccctgtggttatatactctatgatatagacatttagaatcccaccccagtctacccagcattatctatggacaaatgaaagcataccacctcatcaccggccaaattgaattaaaaatgatttttatcataatagtgcaaatgcatgagtgctttctgtttatttagtttgaatacaagctttcactgtctctgcctttgcctggacaggatgtgtgagatttgttagaaaataagcaactggcagaaaattaacagagcagacaaaggtaggggaaatgagttgggcatctcatgcaaagcctgtattttggctgatgttcaactcaatttactccccatccacacccgccttattcatctgggactaaaatgtgtgttctctcatttcaagagtaaggaacccaaagaaaacagagggattgcttgagtcatggcaaatgtcttttccaaagaagattatatatgtcacatacaaattagatttttgaaatgagaagggaagcgaaaggaagggattaggaactgtgttttgaaactcaggaaaagaaacaatgaattaaaaactgtagatgattgtaattaaatagcaacatataaactctggtcatgctcatctacattgtatgtttttgatactatgaattgaagctatgcatacttgaatgggtaagggctgtgggatcttagaataagacattttacttttacattttgggttgtttttgtagtgctgatgatggaacctagggcattatacatgccaggaaagtgcttgtcttaggttttctattgctgtgaagagaaaccatgaccacagcactcctataaaggaaaacatttaatttggggtggcttgcttatagttcacaggttcagtccattatcatcatggtgcagaacatggtgtcatgcaggcagccatggtgctggctatatcttaaacagaagacaacagcaagtggactcagatggtgagcaaagcaaaggaaatctcaaagcccacccccacagtgacacacttcctccaacaaggccatacctactccaacaaagccactcctcctaatactgccactactatgagcttatggggaccaattacattcaaactaacacattgctctatcctgagctatatccccaggcccagatcatagtttaaagcaaggttgccatgtgcctcatgaaaatgtatttaattttgattagaaaccatgagagaagggcaacaattttatggttttgttcaacataacatttttattgattctctgagaatttcacaccatgcccccaatcacactcactttccagtccttcatgtcagccccccaacccatcccatttgacttccccccccaaaagagtaaaaataaaaataagaattaaaaagacaggaaaaaattaagttcagcttatgttatctatatactcactcttgcatggtcaaactctcagtggcctgccccttaaatagaactgcatcctttccctcccacaccccagcctgaagccatctattgtggagatctacacttcagcatccccatcacatttttgtttggttggttggctggctggctggctggctggctggctggctggctggttggttggttggttggttggttggtttttggagatagtttctctctgtagccttggctgtcctggaactcactttgtagaccagactggcctcaaactcacagagatctgcctgcctctgcctcctgagtgcccatattaaaagtgtgtaccaccatttcctgaccccatcacactttttaagagttcttttcaatggcttctagtctaagctgttactttgtggggggagaggagttatggggggtaagggttgtcacaaaagccttccatgtccctccctctcaacagtgcatctgtagtcatccatgtcgcagcaaaagtagcctccttgcacttcacagtcagtgggagcaaggataatgggtttccacatggtttctggcaacagaacagatgacaaatagggcccctggctccaggaggaccaaggactcagacaaggcccttggaggcagtctagccacagacatcaacaccgcctctgggtggcagcacaagccattcacatcaatatggctcgcaactgcagcatggctctcagacaccaacatggcctcaggctacagcacagactatagatatccacatgcccttcagtggtaacatcaacacagatcccatccacaataggaccatggacccagtcatggcctcattggcagcatggatctaaacatcaccatagcctctggtggcagcataagccaccccatcaatatggctcgagacagcatggcccatgaagacaaaggacttttaagagcaggagtggcaagcccccacccatgtgccaaatctggaccactacccatttttctatagctcatgaagctggaagtagtgtttaaactttttggtaggtaaaaaaaaatgaaaataattattttgtgacatgtgatattacatgtttaggtctacaaataaagcattacagtaacacaccatctcagtcatttatttccatggctacttggagacctaaagatgtcattgaataattatgatagtggccacaggagtctcagagcagaaagcatccactatttgccactcaggccttgcttatccaacacacatttgaattctaagtcctgtaatgatatttgagcagattgaggactctatcaacaatgaagattgtctgcaggaagaacacatgcgtttgaacacatgcattttcccttacaaggaaaattcaatgttaaagagtatatcagatgttgtgggatttggggagcccccatggagggcgctaccctctatggggagtggaggggagaaggggatggtggggattggaggagaggggggagagggagaagggattggcatgtgaaattataatttgtaaaaattaaataaaaattttaaaaaaagagtatatcagagtgatttgtcttaaatctacctagtacaaaaatggctgactaccttgaatgtcatcatattcccttcttaccaatagggcatcgtttcttttgatgtctctcacatgtaaccatgctgtcagacacgcattccccatacaatctgttctctggcataattatgtccctgcttttcaaatgcaactttttcttccttctgttttttttttcagagctggggatagagcccagtgttatggaatattactttaagtaggcagagatgtgttacatttatgctgcagaatattactttaactatctaaaggtgcattgcatttgtttgtgctgcattcgtttaactagcaaacgtgttacatttgcttatgatgaatttgtttaattatgtaaagatgtattgacgttttaccttgtctgcctaaggcacttgactggtctaataaaaagctgaacagtctaacccagtcacaaaaagacaagcatggtatgtacttacccatatgtggattttagacatagagtaaaggattacaagtctacaatccacactgccagagaagctagtaaacaaggaggaccctaagagagacatacatggtcccctggagaaggggaaagagtcaagatcccctgagcaaattgggagcatgggaagttgggagagggagctaggagaatgagaaggggagaagaggagggatgcagaggacatgagggagcagaaaggttgaatcaggcaaagaatagaagataacaagaatggagataccataatagagggaaacattttaggtttacagagaaatcagacactagggaaatgtctggagatctacaaagatgacaccagctaacaatctaagcaacagaagagaggcaatgttaaatgtcctctcctgataatgagattgatgactgacttttatgctaccgatagccctcatccagcagctggtggaagtaggaacagacacccacaactaatcactgaattgaactggaatccagatacagagaaggacgagtgaagagcaaagggtggtgaaacccacagaaacagctgacctgaacatcagggaactcttgctccccagactgatagctgggataccagcatgggactaatccagaccccaggaacatggatttcagtgaggaaatctatgggacctgctgtagtagttcagtacttatccctagcataggtgtggactttgggagcccattccacatagaggaatactccctgagccaagacacatgagggtgggcctaggccctatcccaaaggatatgatagactctgatgacccccccccatggaaggcctcaccatccaggaggagcagaaaggacatgtgataggtagggttttagtggcggaggggaggacaggagagagaaggtaactgggattgtcatgtaaaataatcttgattctaaatcaaatttttaaaaaaatatgaggaaaaaaaagctgaacagtcaatagctaggcagtaggaggatagatggggccgccaggcagagagagtaagtgggagagatctatactcaaaaagagaaaatgagagaggaaaaaacaagggaggaagagaaggaaacagccagggtcagccagtcagacagacagagtagggcatacagaatgaaagaaaagtaaaaagcctgaaggcaaaacatagatgaaaagaaacaggtttaagattaaagagctagtggggaaagcataagctaaggctgagctttcatatctaatattaagtctccatgtcatgatttgggatctagttggtggcccaaaagaaagcctcacacacactaggcaattgctccaccattgaactgtagcctcagccttcccacaattttctagactatcacatcagttccaggtggatttggatgataagatttcataaaaagcagatgacagcagatcattgaaactcttcacctgctcatccatgtctaaacttctacattctccttccaagtctaaatgccttcaaatttcatatgcctgcttttcaaatctgactgtgtgtaattaacaaaatccttttgctctccctgactgttgtaataaggttctccataacacctagcctggcgggtgccttgctccttctactatgatttcctgtcgactgtggcatttcccatgagttctgtttctccttctctaaagcatgaataacggtacacattaaagataattgttgctcctggcaccatttatctaactcagaacaaatacccagttggacttgttaaaattcaggccccaaataggaactctagaaacggtctcagaattctttattaaattaaatgcttataaaaactctctcgggatgggggctataatttggggcaaggaatacatacagtccagtgatgtttgaacctcaagtattcaaattatcagattttggaaggacagaggtatatgtgatgtttaccatgtatgtggcatttacttcttatttggatcccactgagaattgatttgatctatcaggagctgtgctccctaaaataagaaaaactaatgttagtgacatatgacacagtgcctagtagacaataattttttaaagagccaacattttgtgatgttttgttgtttaaagattcagtttggatattaagtgatcccagaaaccacctgggttgaagacttggtcccaattttatagatccaatagagatgtgattgaatcatgagagctgatgctgagctaatatataggttaatcttgtgggattcataattttatggtaatattggaacttttggggaacttttaaaattagagccctattacagaaaaaggatgaatgggggtgtcccctggaaggatccaccctgccttgtccccttgtctatgtgctttttgaatggcagttggagagccaatctaccagcccacctagaaaagaaacctctgacagtaagccaatgtaagtgttcctcctctaaactgtctcagggctttgtttcagcagcaacaatgaaaagtaacccaatggcactccaatgtcctaaagcttgtgttccatctccacactttacctatctgagacactaggcagatgctctcaaaagtggcacatgccagacctttgtcatagggctcaccggttgctccaatagctctgattttagatgaccagctaaggagcagacatgaattttatctaagccagacacgatatttggcctcatgagaaaggcctgagacagggctaccaactgtccccaagcaaccaatgctgtcccaagaaggcacaggaacatataaatgtagacatagtcacatatttgtgcactaatgcaaatcagaatgtaatctgaaatcagggcacaggatacaagccatcaaaggaatcccaaagcatccatatcacctcatgcagcactcagaagctggcatctgaaaagtagacaggtgacctccacctgacttcacacacatcacctcttggagaagattctactcacctgcagccttggaaagctgatctctgtagctagactacctgccaattggtccagtcataggcagttgactcaacaggactgactgttcgtattcattcaggcagaaggaaataagttgctggactttgctggggtttgagtttttagttggtttttgctgttattttactggtcggttttggcttctctgaacctaaattccttattttgatggagtgttctgccctatgagacctagtgagaagcatatacctctgtcttagaattgaattgctgtagtaaaacaccatgctcaaaagcaacttgggaaggagaggatttatttcctcttacaactctcaggtcatactctatcactgaaggaagttgggccaggaactcaaggcaggaacctagagacagaagctaaagaagaacccatcaatcactgcttacttgcttgtgctccatggctttcttgatctgctttaaaaaaaaaataataccataatatcacccggtggtggtggcgcacgcctttaatcccagtactcgggaggcagaggcaggcggatctctgtgagtttgagaccagcctggtctacaagagctagttccaggacatgctccaaagccacagagaaaccctgtctcgaaaaaaccaaataataataataataataataataataataataataccatccaggaccacttgttcattgagtcctttcactaccgaaggtgagctggggcctcctctatacttgcctacaggtgatctaattgtaggtattttctcagttgaagttcctcttcctaaataactctagcttgtatcaagttgggaaaggggaaatcaccaccacctcaaaaaaaaaaaaaaaaaaaaaaaagccaggacaccttcattatataggtagagccaacaagataactcagacagtaaaaatctaagaatgtttgccaccatgcctgacaacctaaggtcagacttcaggaaccacatggtagaagttgtcctttgacctacaaacacacacacacacacacacacacacacacacacacacacacacacacacacgcacatgtgcatacacgcactatatggtacacatgtgctcctcacctccaccccaggtaaacaaattaaattgtaataaattagccatggtagtttctgtctttcacagctaagatgtgagactgacacagagcccaactcagttggccacagcaccagaccactccatatgggaaatttgagagtgaagctgtgtttatggaagtccacaaagctggcctttgaaaattacttcaatgggtcccatcagtgccaaaagactgtctacaggtgcaccaggaagagcattcaccaaatacaaaattatgggaagaaatattaaaggtctgtccataccctgagttaacacttcaaagtgccagcctcctaagaagaggccatacttcattcctaacagtggactgccttgtaattcctggtacccacaaaattaaccacgcatgtgttaaaatttaattcattttagaacgagtttcattcattgccaataaatgtttcctgatcaagccagccaagtaactagaaagccatgattatctgggaacatgcgaagcaacctcattgcaaaacagaagctcttggggggcaaaccattggtggcaaacatctctacttatttaagagtggctataggatgctacaaatattaggtgcatatgcttttggattgaaagttattaattagtaagttatttatactacttggtgcctatgaaaatcactaagttctacctacacactgccaaataatggctattactattgtttttctctcccactctgggatttgagaccaaatgtatttggatttttcctcacactaaccagttgttcaaattccttcatacatattgggtgtctgtctttcaattcacttcggacactagctacttggaattagcacagactccacagttaatggccttgtctcacaagactacccttactttagatgatgacatcaaataaagaccactatacttttgaccacttgtccaaagatcagaagtttccttgtctgcctcctcaagtttgaagacatgttacaaaagctcacaaaatccaaataggaaactttacgtacagttactagggattttgttggtgttttatttttaataaaatgtatataacttgggaataaccaaatggaagatgcacattgggcaaggaatggaaaatggcattcagcactcctggaggctctgtggacacaccatccaccaaaacctcactattcttctaccaacccagagagctctctgaagccattggaaaggcagctatgttcaccacaacacatcattcgctcactcatatcccattgtttggagactttagaagacttgtgtggtttgttaaatcaatggtgtctagttcagcctcttgtagtgagagtaaaattaacctgtatttatccttgtcctatgtatcttaatttgtacttctatagcctctagctttcatcccatcctgagattgtcattgggactgagagtcacctcagtagcataaaatgagagcttattatgattgacacaagatgcttctctcatcaagaaattacaaaggttttaagggctttgtatcaggaaccagggcaaataccaacatacatctcttattacatcacaaggccacaacatagagaaagattaagctacaatgtcaactgttagttgagggcctagaaagcttcccttaaaaatcaaccataatgtcatacgagacccttatcaagatagtttacagagtacagagaaggtagtggtgtggcctgctgagagagagagtcagatccactagaaagagtgtgtatggacaggtgggtcccctgtttcaggcttctggtcctcctttcacacattgtaacagccatagatgaaaattctgagcaattcaccccttaggttggtcagaatctaactaaggactttattcccattgcccacgaacctagaaagtgtgtgctcaagtctatcttctccaggcagagtctcagaaccagagctagctagtccatcttcccgggcccttttctctatcgtccatcgagttcatttccacattaacaactaaacaactgaagatggggaagaagtgagactcttcagggaagcagcctcatcctgcatttgttcttagataatgctgcgtcttaccagacaaagataagcaaagatagttttaaaggccaaggagaccaaaaaattctataaggctttggctggtttttatctggttggtttttgtttggatttttaccaattaaaagaaaaaaaacagaaaaagaaaatctataaaaaaaacttcccataagaaaatcctagaaattaaagaagagctgttgaaactgggaaaacctcataatttctctatataattaacataaaaatagctctatttacctctttgttctgctataagaattgcatgagcaaataggagagttatttggaaaccttgcagtgctgagtagtcccatggtgtaatcaccagggagacaggggaatgctccagaagatggctgcagctactgcaagattagcacagtgtcacagtcttgaacttgggctttgtaggtcaaatgaatgaatggatctgcttatgcaacacactgaatactatacatctcagacactattccctgaacattggctattttgttactttggtgttcatcaggaataggctcagtgctatatccttgcctttgttctcctcattattttctgcaaagggaaagatcactggccttactgaaatgtatagcttgtgtttaattcgttattcttttttgagataaggtctcattatataggcaggtcagcccttgaattcacgataacgtgcctccatgctaagtcttataaataattggaacttaagtgcttgggaattattgatctcctaatgctgtggttatagttaccagcattttatacccaaggaattcgtctcatactagacatgcaccccttccagcccagaaacgcgcattcaacatagctccatcacctttgtttatcatcctttctcaaagttcacctttctatcagtgcttcttaaaaccccaaggctatttatttatttttactcaaaaataaaagagcttttactttgaaacttttcatagcagcccaaagcatagcaaaacccaacaggggaaatgctgtatggtagttaagtaatgtggaatacagccaaaaggccttctcatgtcaacttagagtgtctggagataccatcaatgtctagcagttgacaaactgctcacttcacggtagccacaaaactaaccgacatcaccacctactgcagtaaaggtcacttcctggatgttttgggaagcagccattgagatgagctctagttagcgccacttctcagcagtaccaacattcaactgtcaccctcttttcacattagcatgctgtggttattcccagcagtggagctgggcctccatggtaacgctcttcagggagctggggaagctctttaattattaaaatgaataattcttaccaacacatttaattggaaaatattacatgttaaaggggcactaatggaacagctctgagaaccaaacagtgtgatagagtatgctttttgatgtgaattttagcagtatatcctcatcccattgggtgatgcattatttagttgctttaaaaaatacctatcatttcatttctaagtggagatggaattattgaacttacagaagcaacactttgaattattcccatttgaaccattacaaacccacaaaaccaaaataagtacattcatgttggttctgattgctaggaagtcaacccaaaagacaccaagcattacatcagccagttaacacagaaatgtgcttagtttcaatggggataactacagtatttcctttattgagggacaaaaaaaatgtgactattgaaagcatttgagtaacattacatttggaaaccttaaccatatttagccttttaacacacaatgtaggtatgtgtttgtcgctgtacagtaggcattatcataaatgctacttccaaagggcaagtggaagaactcaatcttcaacttgacccatcacactcaaatagagataatttattattcctcatgtcattcttgcaaattctctataaacaaagtctctaatactgaagtagaaaaagataaggctagtgatcctactcaatcccttcattttgagactgaaagtctgtttctctgggagaggagatcccagaagcacagggaataattatagtagaaaaactgaagaatggaaggcaaatgtgcccatccttcagcaagataacattcagttttcaggaatttcaccttcaacttgtaagcaaatatcttggaagtgggatgttgctggtactacctctaacgatccacaaaactaatttaaaaaaaaaaaagactaaagaaagatagtttgggacaaggggctatgtttaaagcccttggtacagtaattgagattgcacaagtattgatggataattgatagacttgttgaccaaggaaaacatgatcccatatatcctcccacagattttcaagggaccttgcactccttgccagcactaaaaagatctcaaaggagaactgagagagccagagacccattagtttaacgttgaacttgcctgctctccctgctcctcactgcatcctcaacattaccagtctgtttcctataattctaactcccagacttcttactatcccacaccagtttgctcccattgaattcatagttcatgatgtgaaagcatgtcccagcatagtcttcaaatggcataaatatcaaattaagctgctgctgtctccaaattccctagccagctttccagtcttcagctttctaaattatcctcttgtttcactgggtctgtcggcctgcctggtcccctaatgctggaggaaaatcaaagagctgcttgactggaaaggagtaattactatcagtgacatttccattaggaagtttcctactgagctctcatcttaataccagatactcacattaatgtccctgcccaactcaactcctgacactaatatttcttaattctaattttcatggtttataatgaaggactgctcattgtcagactgtaaaactagtgatgcaagggcactcagctgatacatatttttacccacctgaaatgccatgtgtctgacctactttgcttgctttgtatcaaaattctgttttgtttgcaacatgtggccatgatgtgagcagtgtgtacttttcaacatgtgccacacagactatccaggagacagacaactgctttctaagtttgctttaacagccaaacttctctcatatgagatttttgttttaataaatgagtataaagaacaatatttattagcataaatatgttagggtaacttaaatttgtaagttcattcatataaaaattttctgtgtatgtgtgtatgtggtttttcctctggtaacagccttgactgtcttaaaactctctctgtagaccaggctggccctgaactcagagagagccacctgcatctgcctctgtagtgctagaattaaaggcaggcaccactattgtggaatattagtttaactatgtaaagatgtgttgcatttgtttaccttgcctgcataaggtaccttattgttccaataaaaagcttaaaggacaatagttaggctggaggtataggcagaacttccaggcagggaaagtaaggaggaggagaaactgaggctcaaggaagaaagtaaaagagacactaagggccagccagtcagctggacatggaggaagcaggaaagtaggacctacagaatgaaaaagaggtaaaaaaaaaagcccagaggtaaagtatagatgaataggaacaggttaagttaaaagagcaagagggacaagcctaagctaaggccaagcattcataattaataatgaatctctgtgtctttatttgggagcttgttggtggctcaaagaatgttccaattgcacacctctatttaagaattttaacacccccccacaagaagaaaagatgtagaaattggggatttaaatagaattatatagtaacttcaatgtttgatttattttcataaattgtattggcatagataaactgtttctattggattatccagtattttaaatttgaaagaaatggtagtttaaaaagacatgaaaatgacaataccagttgacatcacaaggtgaatagaggagtctcagggtgccccacccctagtgaagagctacaggcaattaataacttctgagagaggaagacagtcttccccaggaatgagccccctaatttgttattcaatatgaagtgggcagccctacaaacatatacatgcccagcaacaccaaatgactcagcaggttgtgtgtgtgtgtgtgtgtgtgtgtgtgtgtgtgtgtgtgtgtgtgtgtgtgtgtaataacagttaaagaaaaagaggcaaatggatatacaactgagcagttgggagagcctatgagggctttgagggcaaagagagagagggaaaatgttataaaccaattatacacaaatataattcgtaaaataaattttaaaaagaaatgccaaatatattattccaaggcatactaaacatcatagctaccttatctcctaagtatttttagtcaccccaaatgtgtccaaatctgccatataatacgtcttaattactttgcttttgctgtgataaaacaccaagaccaaggcagcttataaaaggaaacatttaatttggtccatggtttcagagggttagagtccatgatggcagtgcaaaggcatggtggcaggatcagctgagaggtatcttgatccacaaggaggtaaaaagagatacactggttcttttgaaacctcaaagctcacctgcagtgacacacctccaataaggccacacctcttaatccttctcaaacagttgtaccaattgatgaccagttattcaaatatggggccattttcatttgaactaccacataatgcaagggaattgcttgatgtggcttttcaattacagttttccggattaattatatttttgaatgccatttgaactacactcttaaaaattcattaaaacacatccatcaaagcgctggaaggatgattcagtcattcatagcacttgctgctcttgcaggggacccaaattcatctctcagcacccatctaagatctcatagacatctataaattcagttccagggcatccataaccttgtccagcttccaccaggactagacacatatacagtacatatacatagatgcaggaaaaacagtcctaaattaaaacaaatttttgataaagcatggccgtggaacactactgctctgtagaacagtttgataacatgactgatacctgtccagttaatggtaagaagtagttaatgaaacagggaaaggggtagagaaggctgtgactactgctgtcatgagtacacagctccctgtaagcctccctgcctccctaccctggcgaggatggccctgtctcttgcaggaagtagcgcaagtaccagccccttggagagattatttgcaacagaaggcatagatcatcattttaggctgaactgtgtctccccaaatccttaagtgaaagtcttgaggttaaatcagatcataagggaaggctcctaatcccatagaactcatgtccttataaaaaaggagacacaccagaaagccccccccccactccacaagcatgcacagcaaaaggagtagaaagacagagcaaaggtgttgtccacgagctgaaaactgaagcctcaccaaacccagccctgcaggcaccctgaacttgaccttccagatttccaatgcatggaactatgagaaaagtttttgtatgagctactcagccactcagtctatagtaacttgctgtaataattcaagaattccaataaaatcactaaacagatatggcagaaaatgtttaaatgatctcagccatggaagtttccataagtttaatcattatgaggttatttggatttgattgcattgggatctgttagtatttttctgccttaacagagtaaataatttttgatattcagggttcaaacatgagttttcatagatctgggatgatctcagcttttccagatgactttttgtcctccttgcccattgtgcagagcttttcacatccccttaagctgctaatgtgtcgttgggaagacatcttgattttttttttagatcattctgttcagtttctatagtttctctttctttattcatgtcctccttatgtcttataccaatggtaggaacagcatggcaccagcatggccaccctcatgccagagctcctgacagtcatggatctgcacacagcctcctatttcttctctcgtgcagttactcaggcagccacaaccaatgtaaatcactggaaaggaaagctatttttttaattcatcttttatgccttttatcaaatttgactttagaggttaaatctgatacagatttaaatgatcactatggcctttgccaactgtatagttgcatttcttctaatcagaaagatgctgagctcatccactctggaaacaatacccgtcccctccaactgtgtgctgcacacactacaatgtgaaggcttgtccctcattgttcatattttcattgtctctacaactttcaattatttttcagataaattttaatacagagagcttggcttacaataatgtcaatgactcagtcataaaaacaactaatttttcaaaatactctaaatgcctttgataattgccaaataaacaaggggcctgtactattgttaaatgctattccaaaaacaagataaaacatctattttagtatgacagtgccaatgtaagtgctccaatttttttcaacaaaatattattgaaagtaggaaaagctgaaagcataatccattcctaaaacataacactagtccaaatctgggaaggatttgtgttatgggcatagttaatacaatagattagaaatcaccttgaagacagagacactcttagaggagaggaaggtcaggacaaacactttgacctgacttctagcatggcactaagatgagcacattgtcatctcagtggaaagagtctggcctaggctgtccactcttcctctgagtagaataaagtaagaaacagacactacgagatcttttcctgattggatttatttcttctccttgtacttgtcagggtgatgacgtgtctctgaacacttctgtaagtcacttttcagagttctcgcctgcctctgagtcggccagtgtgactgcctcttccttctttctaggctttgtccaggttcattatttctgatggctagctttcactgtcaacttgactggacttagaatcagcaggtgaacatacctctggctatgtctgtgaggatgtttccagaaaggttttactgagaatggaagacccatcattccaaatgtggacgacatcatctctaaggctgaggctgcagactgaacagaagtgaggaaatgagcagagtactagtgttcatccctgacacaatacaatgcagccagtcaccgccaactgccgccaccatgcccgccctgctatcatacactgtatcctaaaactttacatcaaaataaaactttcccttgagtagctttcgccacatgctttgtcacagacatgaaaaaaagtaactaataaattatctttactcaatccagagacaatttgcctaggctcagtgcttatcagtggttggtgatggtctattgctatgatgaaacactatgaccaaagtaactcagggaggaaagagtttattcagtttatgcttccacatcatcaaaggaagtcaggacaagaactcaagcagtgtaggaaactggaggcagaagctgatgcagaggccatggaggggtgctgcttcctggtttgctccccaagctcagcctgctttcgtttatagcccaggaccaccagccaagggtggtcccaccacaatgctctgggccctcccccatcaatcactaattaagaaaatgccccacaggcttgtgtaagcctgatcttatggaggcatttttcttttttaatactttctattttaaaacaatcttttctcattttatataccgaccctagttcccactccctcctcctgcttccctcatcttccccccacccctatctgctccttagagaggataagccttcccatggggagtcaacaaagtctggcatatcactttgaggaaggaccaaggccctctgccctgtatctagactgaacaagatatcagtccaaagagaatgggctccaaaaagctagttcaagcactagggataaatcctggtcccactgccagtgaccccatagactgcccaagctacacaactgtcacccacattcagaaggcctagtttggtcctatgcatgttccccagctgtcagtctagaatcagtgagctcccactagctcaggttaggtgtttctgtgggtatccccaaaatccagccacactgaacctcttagaagagaaagtgggaagtacctttgaatgaatcgagacaggaaaccactgcctgaacataacaccagtagcacagacactgagattgacacttaataaatgggacactctgaaactgtgaagcttttgtaaggcaaaggacacagtcagcaaagcaaaatggcagcctacagaatgggaaaagatcttcataagacccacatgggacagaggactgttctccaaaatatataaagaactcaagaagctagtcaccaaagcaccaaataatccaatttttaaaatggggtacagatctgaatagagaattctcaatagaggaatctcaaatggccaaaagacacttaagaaattgctcgacatccttagccatcagggaaatgcaaatcaaaacaactctaagataccatcttacactggccaaatggctaaaatcaaaaacaccaatgacagtctatgctggagaggatgtggagaaacgggaacattcctccattgctggtaggagtgcaaacttacacagccactttggaaatcagtatggagatatctcaggaaaatgggaatcagtctacctcaagatccagaaattcctctcttgagcatatacccaaagaatacacattaacacaacaaggacatatgttcaactatgctaaaagcagcattggttgtaatagccagaacctggaagcaacctagatgcccctcaaccaaagaatggatggataaaatatgatacatttatacaatggagtattactcagtaggggcgtgggggggagggggcggcaatgaaatcttgatatttgtaggcaaatggatggaactggaagaaaacatcctgagtgaggtaacccaatcacagaaagacaagcagggtatgcactcactcatatatggatattagacatagagcaaaggactaccagcttataatccataccaccagagaaactaggaaacaagaaggaccccaagagaagaaagcatggttcccccgaagaagggaaaggggacaagaacccctgagcaaattgagagcatgggggaaagggagagaagggatgtgtaacccattttttaattggattatttggtagtttgatgtctagtttcttgagttcattatatattttggagatcagtcctatgtccaatgtggggttggtgaagatctcttcccaatctgtagactgtgtcctttgctttacagaagcttctcaggctcaagaggtcccatttattaatcattgatctcagtgtctgtgcactgctgttatattgtctgctgtgtccatgagttcaagactacttcccactttctcttctgtgaggctcagtgttgcagtctttgatccatttggacttgagttttgtgcatggagatagataaggatctatttgtactcttctacatgttgacatctagttatacaaaatttgttgaagatgctttcttttttcattgtataattttagcttctttgtcaaaaatcaggtgttcaaaggtgtgtggattaatatcagggtattcaattcaattccattggtccacctgtctgtttttaatggaggcattttcttcactaaggttccctcctctcagatgactttagcttgtgtcaagttgacattaaactagcaaacagagtgaccataatcattctttgtgtccattcatgacctgcccaggacagaccatgaattcatcatagcaagtctagtggagcaatattttgacactaattattttgattttacatatatacatatgtattatttatgcttatatattatatatgttgtgatatatgtacatagcaaaatgattaagaaaaatctactcccatttactattaattaccatttcctcttgttctctctctctctctctctctctctctctctctctctctctctctctcgtgtgtatatgcatatactccagtgtgtgtgttcatgcaaatgcatgtgtgtgtatgcacacaagcatattcatgttttctgagagctcctaaagtctcttgctgtagcaaccttttgtttctctgcagcattattaaatagtcatcatactgcatctcagatgactctgggcttctttctctccattcacaggctgcaggtaggcactctgacccggtgttatgggggaggaaagatcacataagattaacagagcttagttgtttcttggctccttcctcattgagttctggaagctgagccggacagaggactacatcaggagaggagtttctgaaactcaaacactgagttttaaagtacaacaaagtaaaattcatgctccgaaaaacagatggcttcaaaggcatttccaatgctgaaactcatttacaagggcaaaaggaaagttagaaaatccgatgccactaaatgtccccaactatggcagactctccggaaatgagtcttagaagagaagtgaagctctacctgaagtgaggctttaaaagcagagaaggctgggcatagctgtgcacacttttttatatatttttttattttattagttcaaattaggaacaagtttgcttcacatgtcaatcccttctccctcgccctcccctccccccaacatcccacctgcccctagccatccccactccactccccaggcagggtaaggccctcaaaaggggctccccaaagtctaccacatcatcctgggccaggcctcggcccttccccatgtgtccagctgtgcacacttttaatcccagcactcaggaagcagaggcaggagggtctctgagagttccaggccagccaggtctatgtagtaagttccaggacagccaagactacagagaaaaacccagtctcaattttttaaaaaatgcagaggctatggctgtgccccattatgcatgcacaggcacccagtgctgtgagggaggctcctggtaggctgactccttacacacagtaacaagtcggaggtcccaagcaccagagatgaagacagttagaagctccttccttcaagggtttagatgcccaaggcagggaccagacagctccctgtggtaccatcatactatttaaggtcctggctctgggaggaaaaaaggaaagaaactctcccttaggaatggggatgagaatgatggaagagttaagctgtctgtttaaacctgaagtaactgggatcagtttaaaatgggcagtgataaattttcctgccatcacacacttagaatgaggattaatgaagattgcgtttatcactttcacaccccactaatgattcagtccctctcactagtttataagtagacttgctgtcttcctattgtcacgtgctttattctttgagataactaccacagaatatattaaaacaatgcctcctggaacacatcattaacacagggcttcacacaactcccacccccacctcacatggtaataaatgcctgaaatcccagcactcaggagaatgaggcagagatcccaaatgaggtactctgaaccacataggcaggccctgttcccttcctccccaccaaaagaaaacctctgattgaacctgcatctttcaagatgcaatggcctctgaagttcctaaactccacctaaataagaaaaacgcaatgcatggaagcactgtgccctagcaaaatcaagctacgtctagcccagtgagcctgagggtttgcaaagtagcaatgatgccaaccaggccagacactcctagaataaacaaactgtccagttgtacagtgtccctgggatagagaatgaaaaccagaatcagctatttttcttaaataggaatagtggaaagacattaatttttctggttaggccagcactacaagtaaggaagaatggaggcagaggcagaaggattgaggcaacttcacagccagcccaggctacagtacaagacaatgtattaagaaataaaggagaaaaagaagaaggagagagaatggaaggggtggagaggaagatagtggaaaagatttggatttttttgcttttgtcggtgctttttacttctggagcaacacggaagcaagaagattgccaaagtttgttcttacttgattgaggtaatctaattaattacctgcatcttttttcatatttctaatagtttaacttcatgtttggaagcatcagaagaaatagtaggaaactgataagaattcactgcttgagcaatgagttctaagtacatttaataggcatcatgatttggggggttgggttttttaaatttttttattttaattagaaaaaagattattttacatatcaatcccaggtccctctcccttccctcttcccctgcctccccaactaatacccataccctttctactccccagggaggatgaggccttccattgccttcatatttaggtcaatgacctcttgtggttagattccagaataaaccatcctccagaaatgtagatccctaggcatagaaccgctctgcagacagtttcatccctagtctacccttaacttctctccatggagcttctagctcccacattatgtcattagaagtagattgctacagctatatattccgagccttcaaactgcttttagtgcttcctggaaattatctcaaatgtagaatagccccaggtggctatccctaaaaaataaattctagaaattgtctaagtctcagattccttatatcaaaatggggcttatgatatccactttgtagaactctgtgaagggttggttgggagtgggaaaacacctagcacaattctatgcacagtaaattgggtggaccttaatgtcatgagtgtgtggttacagtgaggtcatgttgtcagtaagaatgtaaatttccctgatgcataccacatgcatttagaagtatcaaaaggagggaatgaggaacagagaaaaggaaagggggaaggaataactgcaagtaaaagggagggaggaagagggatggggaggagggaggaaggaagggagccttgctcttctgcagtctgcattctggttatctgtcctcagtcctgcctgagtgtgatttggatgtgatataggaatccaactaactttgaagcttctattcaaggtgagaaaagctccagaactgtcaggtaatttgagaaagctatgactttgcctcactggtggaacatggtcccattaccacagagcatattattctatgatcccattcagttatcagacaggtgtgtgtgcatgtggcccagaagttgacactcaacatcttcctctactgctctccactgattgcttgatgcagagtctgtcactaagtttgagcctcactgattgactgatctgctaggctgctgtccaggcaaaaccccaagatcctctggtctctgttacccatcaccaatgttattgacatgaaccacagtgcccagcttttttgtgggtgttggggatctgaattcaaatcctcatagcaagcactttatccactgagccatccgattagctcccaccctcattatttttcatgtatttactgactttgataggtattttttcattaaatcccaaaatctgaagttcccaaatctagacatccctcttcctacaccatcctgcccaggttaagatctcatatcatgttctccctgcatccttcatgtggtctgtagaagtgtcccccaaatgcatatgtgatgaagacatggtactgatttagtcaaggttctctggggaaagagaactgatagattgactccatatatagcaagaaagggaaattattagagctgtttacagtttgtggtccatgcagtccaacaatgcctatctaccaatggaaggtccaagaatctagtaatttttcagtctctgctggtattcagtttacaccagaactctgaagaagtgggtcttaatgtcagtcaagaaatggaccttccagtcagagtgatggcaagcaggcaaagagcagaacacttccttcttggtgtcccttatataggctaccagaagaagacatggcccatattaaaggcggatcttcccactccaaaagatccagattaatggtggattttcccacttcaaattacttaataaatgaaaagccctcacaggtgtatccaggctcttgggctttaggtaattacagatgtagtcaagttgacaagcaagattagtagtcaccacaacttgtagctctttggaatatggcaaatcctttaagagacatatctattggggaaaggttaggacatgctcctgaagaggatatttggaacctggtcccttcctctctttgttgttgttgttgttgttgttgttgttgttcttcttcttcttcttcttcttcttctcctcctcctcctcctcctcctcctcctcctcctctcctcctcctcctcctcctcctcctcttcttcttcttcttcttcttcttcttcttcttcttcttcttcttcttcttcttcttctgtttttagagatatgcttatttacttattgttttgtgcatgcatgtgtgcctacatgactctttgtatgccacatgcatggaagatcccttggaggtcagaagaggacatgagatcccctggaatcagagttacagccagttataagctgccatgtgggtgctgggaaccaaacccaggaactctgcaagagcagtaagtgctcttaaccccctctccctttcacagttccattgccaccatgaggtgagcagctccctccaccatccatgccccaccatgatattctgcctcaccacagacccaaaggcaacaggacctataaaccatggacagaaacaagcaaaactctgaaccaaactaaacatgttcatgttctccttaaaaattgtccatatccatatacccaaataatgcacgttcatacaacaaggacatatgttcaaccatgttcatagcagcattgtttgtaatagccagaacctgggagcaacctagatgcccctcaactgaagaatggatagagaaaatgtggtacatttacacaatggagtactactcagcagaaaaaaaagcaatggaatcttgaaattcgcaggcaaatggatggaactaaaagaaaccatcccgagtgaggtaacccagtcacaaaaagacaaacatggtatgtactcactcatatatgacttttacacatagagcaaaggattatcagcctacaaatcctcttcaccaaagaaactaggaaacatgaaggactctaagggaaaatgcatagaccccaagaatgggaaggggcaggaattcctgagctaactgggagcatgagggtaggggagaagaagctgccagaatgagaggaggaggagaggagaggggaggagaggagaggagaggagaggaggagaggaagaggagaggagaggagaggagaggagagggagaggagaggagaggaggaaatagaggagcagaaatattgagtagggggaagaatagaggagatcaggataagagataccatattagagggagccattacaggtccgaggagagatctggtactagggagatttccagagacctacaaggatgacacgaatggacaatccaggcaatggtggagaggataacctaaatgcccttcccctaaaatgagattgatgactattttttatgccatcctagagccctcatccagtggctgatggaagcagaggcagacatccacagatatacactgaactgaacttgggaacttagttgcagagagggaggaatgaagattgaaggggtcagtaccagggtggtgaaacccacagaaacagctagcctgaacaaaaggggagcacatggaccccagactgctgtcttggaggccagtacaagactgatccagatccctgaacatggatgtcaatgaggaggcctctgcactctaggggagccctggtaatgcattagtatttttccctggtgtaagaagggacattgagagcccatcccatgtgaagggatgcactcttggcctggacaaggggaagggcctaggcccggcctaggatgatgtggtggattttggggagcccccgttgagggcccttccctgcctggggagtggagggtggatagggtgggcgtaggtcaggggtgggggaggaggggtgggagtgaggggagggagagggagaagggattgatatgtaaaattaataattgcattcaataaaataaaataaaattgctcatctccagtctatggggcccctggtaatggaacagcatttatatctagtgtatgaatggacattaggagcccattctccatagaggaatactctctcagcctaaacacacaggggagggcctaggccctgccccaaatgatgtgacagactttgatgatcccccatagatggcttcaccctgtctatggaggagaagagggatgggatggcggttggtggagggcatgggagaatgggaggaagagggaactgggattgatatataaaataagattatttgtaatttaaattttaaaaaagaaaaaaaaaagaaaaaaaatctcagactcatcttagtctgtgctaaaacaacacaggttcaatatcccctgactcttgacacatggaaacaccctagaatttagagctatagaaaatactaaaaaactcattccacctcttaattggaaagggcaccacacctgcctgcagcccagagtctctaagtgctactcaaacctagggaaagaaactgaagttgaacaaaataaatgtttgagtgctaaagctctagccagactttggtccccaaagtgtacttaaactaagtaacttgaaatggaaataaactaaaataatgcttttctttaaagaaaaaaattgcccatcgcaggtgttttatcacagtgacagaaagctggccaagcccttagtgccacagcagaaaggagtccttcaaatagccatcctggttattttatgcctaccaatgcctgggaaaattgttttaaaaacagatcgaaatttactataaatcagtagcccagagccatacggcaatagaataaaccctccagctaaacattttaagccaagtctatttcagcccttgcccaggcatgtctccttactggaagtcccaatggcatacctctgatgttcctgtcttgctacctatcgttaggcacagaaccacggagctgaaactctggagaaattcagactccaaacattcaggagtagagcatatggctttccagaagcgggacagcaaagtgacatgtgtctttacaaacatccccactgcaaagtgctccagctgcttaggaacagcatgtctgttttggctttcaccctcctctgttcacaaattagcttttcagctgggcttaagtactgcaaacagatagcttctgaagagaaagatccttgccagacagaactgaagagcatattcagatgctaggctaaaaagtcatagtatttagccattttgttgattaagaaaacagttgtgactatgttcagtcacagaaatatctatccacccatacagaagccctgagctttgtatgtataactgttacagggaaatgtggttttcttgttccagaagggaccccaattacacagatcattgagagcacacctccacactacagtcccaatcactatcaccctcccttatctctcacaagacctatttcagacccctaagttcaggactgtgtcaatggctcaacatgatactcgttgctacatagaaactcccctctcccctctcccttgcctttacccaccccccaatcatggatggctgatggggtcagagactatactaacactgtggaccattaaacctcatacctattgtggaactccacactcaacaggcattcaacatttggcggggagggaaggcagaggagtaagttcctttcttgtcacactggtttctcctctccatttgcacacagctcccccagccctgccacaggcttccaacctcacactttactatgcccagatagtttcttgggtgactgagaatgggatggtttggtgttccttatgacacaatttttctcaccattcatatttgcttcattcatgtgtgtgacggttaatctgactttcaattctactgaactgaggttattgaccacatctatgtgcttgtgaggacatgtccagagaggatttatctaaaggtagggaatctgggcattactattccatgggatctgattgcaacataaagtaaagaagagtgggaatggctggagggtaggcattctctatctctacttcctggttaccatgatgtgaacttctctgctctaccatgccctcgccataatagtctgaaaccttgaggggaaataaatgtttccttatttaagtagtacatgtcaggtattttgtcatagtgatgaaaagtacagaacaccatctaggccgccagagaagtcattaatgttgcacatggggctggagagttggtcggttcattgtaattcaaaggccaataataaagattcatatttgtgaaattataaaacgggggagaacaacccactccaaagctcagggaatatcccagaagagggatgtcaaaagaatgtcaaaaccagaggatgggtagatattcagcaaaaagacatcttgtggacatgccatagacattccctttatgtactcactaaaggtgtggctatctacaaagggcttgctccagattggtccctgttaacattacatcatgaacaaaggaagagcctacgaggcccacttctccctgagggtctattatcagctaaagttgctgatggaggagatgccatttttttatttagagaatactttattagttttgtaatcaaacccacgtagataagaccttacatatttaatacagtgtgttacccctgtacaaatggaaaaaaattaagttcaacatttctagaccaatatggctgttaaggacgccatttttacagtgctgagactacaaaagtcacttgtgttccagcaaataagatccacccacatttatgacaacaccccaaattaaactcaatggaacacacacacacacacacacacacacacacacacacacacacacacaccatgaaagtatcagagggaattgttgaaagaatagggatttcagtgggagagggagaacaaacaaaataatatgatctcccaatgtcagtgtccacacactcagagctactgggtgtttatttgatttcttaccctccttacactcacaggacacttacatgatatcatgcttgctcttgaaaggttatttttctctaacatcatttttgcattttataagctctccctaggaaacacatttacttctaagtcttcaagtaccctaatcatcatgtaagagcctttagagatttgaactgccactcttccccctcattggccatggccaatgaagtgtgcatacaaggatcactagccaaacaaacacactgtttattgatagtgctaacaaagcagagctgttgggaaagttgagttgtggtcacagtgagacaatcagcttcttatccatgagtcctgaccttagttaaacctcaagtaaaacaagaactaagacttacccacatggaccagaaccagatgcctgtctttcagtacataaagaggaacagaggcagccagcaaaaagaataggtttggctccagagctgtgttctgagttgctaccaactgaccagatcagtttgacccagagagagagagagaaagagagagagagagagagagagagagagagagagagagagagagagagagagagagagagaaccatggttctggaagaggaaactaaaaagaagacatgtcattgatgtgacagcattgatgtggtagccatgcacagcagaatgtcacaaactaatttcaagctccaagctactgcttaatctttgtctcttagaaagaagtgatggagaaatgatgaaaagaaattctcaccatctctagtaccaccactaccacaacagttagttcagatgtccgtgggctaaagccaaagtgaaagaatattgttccccaaatgagtccagacacactgtaggtgctgtaacaggtgcctgtggagtggaggaatctgggtctgaatcttggtcctgagtcctgtagcacagccaggcctacatatctccatttctccctcagttttctccatgtctcatgtaagaaaatgggaaatcattcctcatatgattgctcacgtcatattattctggttccacataactaccgctcagtcaaaactatgatctaccctgaaaatactgatttgttaccgagaaggcagaagtggactctttttcaccccaccccaatttgtaaagataaatggggtcgggccttattgagaagaattcatcccacctgtgctatccagaatgccctttgacccccccccccccgtcactggattccctgtgtggtgaataattgacctgcaaactttctatttcataaatactgaatatctcttttatgtcatcagcctaagtgttttaaattatcttttttagtggaagacttttcccaaaacaacaaaaactcccttgggttttcataagaaagttaaatttcttcagaaaatgaaataaaattatttctgcaatattttataatattatgcaagttagagcaatctccatttgacttattatctgattatttttcttggccttacagcattggaaattatctttaactaaataatattttaaagtatgattgttctatgagatgaggttttcaaagtaatagtactttcttttccatataattttaaaacatttcatttattcagacgtgaactctaacttgaccaccaaattataccaatagatgaaatatacaaagatggtctaaataaaatattgtccctaggaagaaggaatcatgagttcaatttttttcagattattaggaaggaccaagaaggaagtgatcatttccattctttggctcatggtaacatcacgctggattttcctagtaaatttgcatagcaaaatattccatctacatgcattatggaaattaataaattctgatccaagaatgattattgatactcgtggccatattctgtactttttccattataagcctacataaagagattaaagcaattctccagagttggatacttttctgggaaaagtatttgtaatagattctaatttagggatttattctaattaaatattgcagcagagtcccctctagactatgaattatgtaaaaactttgtatcctatgaagttaagagacctgaccactacactagtcataggtcaaccacttcactgccaggtgaccatgaacaaattgtgctgtttgtcctataattttgtcacctataaaacagagataatgtcaaaatctaccacatcacatttctgtaaaatttaaatgaaattgtatgtgtatgaagacaaatatatatatagctcctgacacatgtagatattcaataaatactattttcagacaaaatatgagtgaatattttttgtaactttagaatgtttttccacacctggtatcaaagcaaaaaacaaaaagaaatatcagtgaacttaaatacataaaatataaagtttttaaaagatttgctatatttttgattatgtgtatgtgttcaggtgcccttggattccagaagatggtgctggatccctgggatctggaattatagatggttctgaccccattggatgctgagaaccaaactcttctgcagaaattgtatgtaatacctcccactccaaatgtcaagttttttaaataacaaaaatattgtaatcagggtatgggacaacacctgcaagaaaagatttgtaacatagtcactaacaaataggtaaatagctgcaatgcaaagaggaagaaaaatagctaagggagaggaatcaacaattccaaaaattagggccagtaaatatatgaacagatgttcagtctcactagtaatcaaagaaatgcaaataaacaacagactggcaatgattaaagagatggaacagactcacatctgtgagtgcaagcagtaggctggcctcatgcacttctggtaagtgaactttagagaaagtctttttagatagctattgaaaattatgcatcaaaactcaaaagatgcattccctttactttgtaggttttcttttataatcttcctacaatttttccaataatcagacacaaagcaatttctgtttttcaaaattaaaatagtttagttcccctcttcttgtagttttaatgagaaaggagagcccaggaagccttatagggaataatataataaataataataataacatctctgataccacctgacagctcatggattacagagggggctttttgccctgattctcacacctgctatacagaaacagaatgggaagaactacttttcctgggaatagccataagcctccaggctccattaatcctctgtgaacctgcctttgtcccaccgatggtcctaaagtgggaaggaggctggattcaggaccctgggacatcttctccactatcccctaagggtgcttctatgacggtgaattcacacgggctctgtgtcattcagtgactggtaaagagatctctcttcattctacatgtataatgctagacctcttctcaagcttcttaccagatcccaccaataaaataggagacttgcccctccctcctcttatccatgcccccattggaaactgtgctgggtaaaattgtgaataaacaaatggccctatagtgatttcacatccccaggttggtgaaacctgaacactggccacttctaccctctcccctataagccatcattcttccaacactggatagctaaatgcttgtcctatttccttctcgtatttttgttcaaaacaggctcacaggcttctgaaattcattcaaactttagggtaaattatcccaacagcaacagatttcgtaaccatgggattaaaatttaaaccaaaataataaggttaccataaaaatttaaagcattcaaatacaaacaaataacaggcaggaggttagtcccaacaatacaagaatgatgagggcggggcacacacttcctaagaacccagtgtcaactctgagaatcagatatcagtggggcttgaggattaggttgttttgtctgaaatttattctaaaccttcactaatacttactgagctgtgaaaagtgatatgagcacaggatttcttaatatgttttagagaagaggaagaaggggaggaagaagaaaggaaacctaaaaagatttaaaaaaaaaaaaaagaaagaaagaaagtaaaaggcttagagaaaaagaatctgaagtgccagaatagctatttttccctgaaaagaaaaccacaaaggaagactaccagaaaggagtctattaatggactcccttcttttcaagtcagcaaatgaaagcaagtcaactatgatgaggaccatgagatagttgtaaaaggaggctgtagatgagttcacatgatgctggccacgatactggttagaatcagaaagcctcaagtcacctaatgtgacttggaggagcaaaagaaccttacaggtcacagtcacttataggggatcaatgacaactcccactcaatgttagttcacattttggtaatgtgtatgatgggaggcttttctttctgagaggagaaagaattaagtggctgtattttcatcctaaactagccaaagttctgcatcattccatggctctaattcaaagctggacagggaagctagagtcagcatggaggaagggcactacttccacaggaccccagctggaggctccctgcgaaatagtggcaaggggagcaggaggtagacagtatgtttgactggccctcccttctcaagctgatgtctctgaggtgatctggaacactacaatggaaaagaatactgaatattaaggaacctttcactgtctaagaagttttgaagctctagtctttttctgtctatattaatagacattgtcaaaacaagtaaacacaatattgctaaaaaaattgtttaaagacactacataatacataaagaaaatgtatacacataattgtgtataagtggagggtaatagcacttgaacagcaggcatgaagatgtaggagtaggcagtccccaccagccagcaagcaggtgagtgaccctcttgccagctgcactgccataaacctgctagatcctattcccccaagatccactccaccacccaaacctacccacctcatcatcctccctgtggctagccttctccacaactccagcagactccataggcctagatacagtccaaaccagttggaagaacagaagactccataggcccaggtacagcccagaccagtcagaagaacaccaccccctccactgggctccatattctggtctaccactttggaagaagacttcatttttatgaaggccaaaatcactcagtcaaatactagcaaaatcaaaatcaaaaagattatccacaatgaccaagtatgcttcatcccatctacaggatgggatgaccccagatacaactcctgaaaatagtggatagctagcctcaactagccttctcctgtaatcagattggtaactacccaattgtcatgagagagccttcttccagtaactgatggaaacagatacggaaatctgcaggcaagcactaggccaagcctggggaatactgttggggagaggcggttaggattgtaagaggtgtgtgtgtgtgtgtgtgtgtgtgtgtgtgtgtgtgtgtgtgtatttcagggtcatcacaagggaactcacagaagcaactggcctggtcatggaaactcacaggcaatgggcctacaactggggagcctttgtgggacgagcctaggctttctgcatatgtgtgagtgttatgcagtttagtctactagtgagactactggcactgggagctgggactgtccctaatgttttgtctggctttggggaacccgctcctaatgctgggttgccttacccagccttaatacatgaaaaggagcttagtcctacctcaacttggcacccatgggaggcctactcctttctgaacagaggtggagaagagatggattggggaggagggaacagaagggaggtgggggagggactgggaagaggaggagggatgctacagtcaggatgtaaaataaatgaaaaaattcattaaaaataaataagtaggcattaagaaaattctgtgatatggaagtttttgcagaccatcatccaacttaatctaatagacaccccacacccacccaggttccatctttctacaatgttctggctttgtttctcttttttgtcaaggaaagagaattagttctccaaactagactagagaccatctgctggtttcagtgactaaaagtgacctgaggagtaggaaaaagtgtgtcatgattgagcccaaagaagaacctcccttgggaaattctgctttgaattcacttagtagcacagccaaagggaagatccaaaaagccaggctataattagcaaataaagtaaagaaaactctcatcatttggacttgaaaactcactatgtgtcatttagcacactaatatgttgccaaaagcagtcaggcaatggaaaacattaagtcattaaagaaaatgacttgtatcttcttccattccaacctatttaaatttaggacagatgacatgatcaacctcaccaagccaactctgagagttggggttttcctagagtatgattttctaagaactaaaacctttgtcaacgtaactgacttttctaaccagataaagttgccagttggttctcagccgatggccccatccagggagttctggaaactttgtgaagagccaaatgcataattttgaactttcacaatatgtgctgacagaggaaagaaagaatttttattctggttgaagccattatgcaatggagcctaaggcttgtgaaagaatgttgtatggattgaaacacttggattctgactgggtaaggcagggatcaaagttctggctatacagggcacactagttgctattccattgtgccactgagcaaacagagtaaagctattctgccatgctgctaggaatggagactctttcctttaattctgaaatcatatttgactgggtcccattccaattttgctaaataccatcatgcaatatcatctgaaatgcttggaagccctccagtcaaggtgccctgattcgctggtttccccttttggaaatgctaacagggcttagtcacctaggctgctggggaggagcaaaatggaaaatacctgaagtattgttatataaccgtgtgagccagacttaactttctatgtttcagccaacttaatattaaaaagcagtttctctttttttctgaacatatggttgaagggaaagtggtgatttcaaataaagtagcattaagagagaaccaggtggccaagtggtaccatgcctccatggcaaagtaaaaacagacagatgagtcttaactcctgcccttgaaaatgtgcagtccacgcattagcattaaatatgcttagaagcaacagtgtgaggcagcaacacaacccttgcttccagagagcacaaaggaggatgggagtggtcaacaattaagcaaacaattgtaccgtgtgaagaatgctgggggaaacccaggatggttcaggagtacaaatgagtagctaacctcaacttcaacaaccagagaaagatgtccaaataaggtgaagtccaaatgatgaatatgatcaaaaatgttcccagttgtagagaaggcaatgttggggagggggtcggtactcagttgtgactgattagtcctcattcaccaattgcacaactatgtattgaatgcacactgggattcagagacatagtaaaaggaattcccttcttgattttattacattaacaacagtagttgtaccaaagacagcatttaaaacagcacacatcatatgtttagtaattctgtcatttatccaacaaacactagacagaatgcctgagaaaataaccaacaagcactagacagaatgcctaagaaataaggatcaatatttaaaattcaaatttttacttgacttactaacatgaatagaaaccaaaatcaggcaaggtctgtgcccataatttgttctaatttcataggtaaaataataatgtatttgttctgcacacctttatgatatggaaaacgtgtgtgtgtgtgtgtgtgtgtgtgtgtgtgtgtgtgtgtgtgtgtgtgttagtgtaatgtgtgggcattcatgtgaatatacattcaagtttgtacacacatgtgtgtaggcatgtggagacaagaggtgggtatcaggtgtctctcacccttgctccccagcaaagagtctctcaccgaatctggcctcctctgattggctgcttagttctgtggcccacatttctctagcaccccagtgctagagttacagatgcatgtatccaggccccgatctctttttataggtgctggggatcggatcctcctacttttgtaacaggtcatttccaagctaagccatcttcctagtcccaatgcatgataatgaaaatatagttatagggttatagaaatgactcagatattaagagcgcttattgtttctagcagagaacccaagttcagtttctagcacccacatcagactgctcacaaccacctgtaactccagttctaggagctgcagcaccgtcctggcctcagtgagtacatacactcacagacacatatccacagagaaatgtacacatacacacttaattaaacagaaaatctttttaaatactttaaaatacagtcagagatctatgatttcattcatatatgaatactgtctatgcaaggaaatattctaaaaatcttgtgaagactagatatataattacattttaagtttatgtatattaaaatatgtatatgtctattaaaatatattggaaatgcaagcctcggaagatgcctctgtgagcaaaatcacttggtgtgcaagcatgactacatgagttcaagcccccaacaccatgtaagaaagccaggcatgagtgctaatgcctataacccagcattgaaaagcagagacagatggatccccagatagcactggccagccagcctagctgaaaggaggagcttccagtcctatcagagaccatttcaaaactatagggccaagagcaataggcatcttctctgacctctgcacacacatgcatgagggaatgtacctgcttacacacacacacacacacacacacacacacacacacacacacaccacgtcacatactaaaatgtacacaccacagagggataaataaataaactatgaacatatgtgaaaacaggaacataaatggagatggtggcagcaatgtactagtaaataatgagtttgccccaaaaacttcaaattattttgatttgattattttctgtagaagaaatatgcccacaaatgctgattttaaaatacttgtatttgaaaggtttcttaaaatttacagccagtcttcaggagctgaaacaaaacaattcaataaaatagccggggatggggaagaaatagctctttaaaatttctcactctctcttgaatattctaaaacattttatattatgcttgaacaacagtgacatattgtaatgtataagtaactactaaaagaagaatgcagaaatatattactaagaaatacagagataaattgaataattaataattcataatccaagtgaagttaaaacaactgagaaaagaaatacacaacaataggacaagtttaaaatctaataagattgtaaactaaaatcaagtgtccttgtttgctgtgattaaacaaacaccaaccaaaaccagcttaggaaggaaggggtctatttggcttaaagttaccacccatcatcaatggaagccaaggcatgaacctggagacaggaactgaatcagagtccatagaggaatggttcttgctgactttctcagctgtttatcttatacaactcaaaaccacctacctaggaatgccagtggccaccacgatctgggccctctttcaccaattagcaattaagaaatgcccctacaaacgtgccccaccagtcaatctgatggaagcaattcctcatatgaggttctctttccccaggtgtgttaagttgacaattgaagctaactatgacatcaagataaatcagtaattgtagtaaatatcaagggactacatatggctcactaattatcaaagtaaaatagaataaatgaaagtaaatcatgaggaaatacataccatacaaaatattaactaataaaactcataggctacactaattatacaaagtaaattttaagaagagaacggaaaaaaattcaaattatttggtcaatctaaaagacttctaacatttactcaaaaaaacaacaaaaattgatttaaaaaagtaatagtaatgaaagacctagtgacaatcacaattggagtatcccctatcttttactcagtaactaatgtcatgcatgggattgcaggaaagtttgacaacattattagctggcttggccccaatagaatggaccaatttattgaaacacagaatgtgctaaatcttacacaggaggaaatagacagtctgaacaaacttgtgtctattcaagacaccaaatcaatacttaataactttcccaaccaaaaagcaatagagtacactgggagcagggttctcctctacatttaagacagtagaccatctctctacagtccctttcagaaatcaggacaaatgaaataccttgaaaagtgctttaagccagtatcagcagttcaaatccacatcacaaccaagcagagtttatctgcaagtctggctcaacattcaaaaattatttgatttactatagtacatcagcaggctatataaaagaaattgtatgactgtactaacagattcagaagagcatttgacgaaatgaaacaccttatggcaattcaatctctcagaagagcagtcacatacagcagtctagcagtccaagctgtagcatacatagcagtgagatactcaaagcattgctgctaagattaggctcagaaatcaaacttgaagtctaagtctaaactaatttaataatataaaaccaagctggagagatagctagtcagtgtcttcattactgttctattgctgtaataagacatcatgaccaaagcaactcacataagagtctgtttgggcctacagtttcagaacattagtccatgaccaccatattagaaagcatggcagaaggcaggcatggagcaggggcagtagctgagagcttacattttgatccacaggcagagagctaactttaaatgccatgggcttttgaaacttcaaagcccacctccagcgacatacctcctccaacaaggccacacacctcctaatccttcccaaaacagttccactaagtgggaaccaagtatttaactatatgagtctatgagggacattctcattcaaaccaccatagtcagtgaagtatttgactcagaaacatgaagacctatactgaacccatatttttaaaaagccaggcataacaacatatgcctgtaaacctagtactagagagacagcctagcctataccatgaagtccaggccaatgggcctttaaaaacaaatgggtggagaagatggctcagtcagtaaagggcttgcagagcaatgatacagccctgaatttgaatcccagaacccatattaaaaatagcctggtgtagcagtgaactcataatctagccaagaagagacagtaacaaatgatccctggggtttgtcagctcactagcctagcctaaccagtgagttacactccaagtgagacactgtcccatttagaaaaaaattaaatacaaagcacatgaggagagatacccatggttgatctctgccttcgacatgcatatgcacacacattcatctgtatgcccatgggcacccacatgcacatacatgtctacctgtacatttacatacatgtgcacacacaaaacaaacaaaaaccaggagtgaagaagttcagaagatggtggttaacaggagtggtgtactagactctccaaggaatagagttgtcccgacctgcaagacatcaacctggggcaagagagtcagggatagggaatagggacaagagacacagaaagaatgaccacaagacaggattctgatcaagtggcaaactttacttttctcaggctagcttatatagtcaggatatggggaggggcagaatgggttgtttgcgcaccaggagttggtataggcaggatattaggaagccacaaagaggatgtttggcagggtaaagagttcatgagtaagaggtccaggaagggttgcctaggtgactgagcctgtgggtggaggtctgggttaagttgtttcctttcttgagctgaggttctaaggagctgctatgtaaaggttaactatgtgacctgccaagcatggcctaggatctcatgccaagccctgagatttggctcccaacataaagtgaagaagacagggtgacagttgtcagaagacatagataataactgaaaaccctcaagtttaatagtaaaataaaattagaaactgtaaatagtagagcaggaaaaacacaagagtccatcctgaatggattggcatgctctggggagttctttcatccccatgagaaggagtgaccagagtcatgctgaagacagcctcagtaaactgacactgtactgtcagcaacagacatttaaaagataaaaaaaacaaaggtgggatgcatgcagtaatggcagagggaggctagttttttggttttttgttttttttttttttaatgctcttcttggactgggctggaggctttgtggcctcagaccttccatgtgctgcaacttagagctagtgttgtggggctacacactggagcctggccactagaattcctctagacagggagaagaaactttgaattgaaatatacagtattctgtaaggtaaacatttggtaggagaatatagacacaggttccatgaaggaagtcaacactgtatggagtgtccagaaatgaaaacaaaatttgcaatgcaactcctcaaggatcaccaagggatatcaccagcatctatgattggaaccatggaagatcacccactaataggacaataatctatgacctgaaattgtgaaatgccatccgaagtatatcaggcatttgggaactgagaaaggaacaccaagagatttgggcatcaaacagctaagattgcattccaactctgtgctcccatttagactctgtgttcccatctagagtcgatgctcccatctagattctttgctcccatctacactctatgctcccatccactcaacttctatttctctcttatttaatttccaatatcaatttattaggcaagctcaatcctcctctgttctcatattctatttatctattcatctatctatcatctatctctatattgatctcctttatttgttcttcctttctttccctattcacttaccatttaacatgtttggactattttaatctacttctaataatcatacttctctatctctctcttccttcatccttttgccaaaactgcctcattgccctactttgggactactcttccctccttctatttacttttccctcttctgctttttctatatcatccactgttcatgacaagtcttgttctacttttcaccatcccactcatacccacagcaactaataccttagtgcatatcgtgttcctgaaatgattgtcgttgaagactgattgttttctatttgattattactatatggtcattattagcctatgaattttttcatagttaacagtgattgctcttggaaatagtattctacttgcagggaaatactggagattgaacctggtgcccccaacaagccaaggaaaatgacaccttattgtaattacaacttagtcacccttgaacattgcaaacacttccactgaaagaaaaaatggttgatttaaaaaaaaaaaggaattcacacaataacctaacctacttgcccaagttcaaacacagaaagcaaaggaggaaaagacctgaatacatacctcgccagaaaacatacacaggaggcaagcaaccatataaaatggtgttcaatgtcataggtcaatatcatagattatccaacaagataatcagcacatgatgactagaatggcaaaaactaaagtaccgacaacacatcaaagccactgaaggtatgaacttgtgactggtagaacagccacttttggaagaagtttggcaattcctcaacaaaccacagcacacacttaccatatgagaaaacaaatacacactttgggacctacccaaatgaaatgaaaattatatccacagaaacctctatacatatgcttataacaattttattcatagttgccaaaatttggaagcaaccatggtatctttctgcaggtaaatggagaaataaaatattattgaaacctaaaattaagctgccaagatacgaagatatatagaagaaagttaaaagtatactctaaagggaaagaatccaacccaaaatggcaatatagtgtatgaaactgtatgacatccagaaaaaaatggaaaacatatacagagagtgcaaaacagtcaatgggctagtgaaagatgaagagatagtaggtacagcatggagaactgtcaaggaaatgaaaccagactgtatattgcaacgatggatatttatcaaaacccatagaaaatgcaatactaaaagtgaattccaatgtaaagtatggcattgggggacagtaaaatgccaataaaggccttggttttaacaaatgtatccctctagagaaggatgttggcaaaaatgtgtacatgtgtgttcacaggaggagtgtggaacttttgcctttctgcttagttctgctatgcatcagtaactactctaaataatttgtttactaattatttcaaaataacatgtctaaaggctgatgcagggggattgtgagtttgaagccaagcctcggccacaaagagaggaatgaatgttactaagatccagggtagcaatcccacagtgttatctgctttttgtgtggcttccgttctcacagttgctttgtgatctcaaaatggacatgctatctttatctcaacttccctctcaaaaagaataagaacatggcaaagagaaagagcacacattgtcattgaggaaactttcaaacatcattgagcaatttctgcttctattcatgggtcaaaacatctaactgcaaaatgtgactttattatccaggtacattgggcatctattgaagatgtaacaaaaatggtgctttgtggatgggcaatggaacttgccagacaaagcctaagtgaacatgaattatttttacatataagtaaacataatcaagtgataatacatatgtacctggaaatagaggtatatatttcatcctaaaactctccagttcaatatttccatacacattgttcaagatttttataaataatgtcacttgtaataatacctactggttatgttcaggcactgaaatgtttctatacattataacatttaattcttgtgatattcctgtaggcaattattgctattcattctcattatacttacatataaaattaattttcaaaaagataatgtgtcccattttacacaggtatttggtgaaataccaagaacttgggagtcagactgagcccttcaaaactcattgttctgaagttcttttctctaagatgattttttaactttcaaaaaatgcacatactgtttcttacaaagcctggccattcttaacccatagcaattttttgtacaaatacttctctttggtagaatgtttctcataaaaaaataatctacagtattttctttactttctgttcaatgttcctgagtaagtttcaaggatgcctttttccttccccctaaaggtctctcagacacaagcataacatctcccttggccaagggctacatctttcctactgacgctacagatttcagaaatgtattgtatcttactttttagaaatttgacagatttctttaacaggcacaccttagaaaaatgtgaacacatagcaatacaagagaggtgtctctgcactttactattggaagacaaatttctttttcatagactataaaagattcctggaaatctgttttttactaagtacagtgagatgttgggaggattaaagatagttgacacactacaggaaaaatccaggggagctcagaaggagacagtcatctcaacctatgctgaaacattctccttgctgtaaaagcagcaacaaagccctaacacttcaggcagctgaggaatgtacacactggactccaaccctgagtagcactggaaaagaagagctagagtttctacttaattttcttttccatggacagctttccctaaagtacccttacaaagagaggctggctatacttaggaaatgaggcaagcagggccaataacatggttctaatgggttgctcattaagacagtaggataagacttcttttgtgccatgcttctcacagagtggaactagactgatgggtggttttttcattggagactcggtaaatccagaggacattctcaaaatagagcatcagttggaatataaatagatacccaaagccagctagatgagaaagaaaacagactaaaaatcttcttgttgatatctgcagactccgtggaagttgtggcagacactgcaggctgatgacctctctggggtatgtcaccttgtactaaaaagctaataactaggattttctttggatactttggaggtgcacagtacataattagaaaatgggagatgaaagttatttacttatcttattatttacttagcttttaattattattaaataaattaattgatgtattagttggttatttaattatttattaattatttggttctgagcattgaaaccaggaccttatatatgccagataagagctctgcctgtgaaatacatcttcagtccaaatgtgtctcttgtctttaaatgatgactctggaggttgaacccaggatctcatgcatgtcaagcatacaatcaactatggagtcataccacacagccctaagttttacacaaaggtcttctgggccaggtagttactcaagcagagtatggcagcatcgagacagtttctatttatagtcttatagccacttggagtctctggagactgtgttgttgctgattggccataatttaaattcggctgtctggaactgctggaaatatgttccactctttaatgctctgaaactaatcagtttattcttgacaccctaaaataaactgtcttgtctacagctaataatcctggtccacacaggaatttctatcagaaattcttgccaaaaatgaactctttcagaaaatgaaaatgttgattagcttagtccttatttaagtaacaaaagttcctcaaagctatgaagttcaaaatcagggtggggtgccatcagactctgtggctcatgaaggctgtcctccaagcttacagtggtagcagctttctggttttgcaagatagataactcctcttcctgtccttagaaggcttctaatcactcatggaactcacctcaggacctcatctatatctaatttgttatctctccaaagccccaactctagaaaaactatcttggtgaacatggaagagataatggtcatacatggaattacagctagttctgttcaataactaaaaccaaagataatgaaatggttgaaaaattcaaatcctactctaaaaaatgttaaattcccataaagaagtctcaaacaagtaaatgactaaataaactccgcccaccctgagtccggatgcaactcacccttgtccgccctcccccctctgccccctgcctgccacctgagagagggagagaccccacatgcacccactggaaaaagggaggggaagacaacagaataaagaacacactcaacaacagaaagaccaatatgacaccaccagaatctagggactccaccccagcaagaactgaaaagcccaatgcagaggatgaagaagagatggaccttaaaaattaccttatgaagatgatagagaccattagagagaaaacaaagaaatcccttaaatagaagaagaaaaaagcaaaatattacacaaaatggaggaaaaaacaaaccaaaagattcaagaaataaacaaatctcttaaagaatctaaagaaagtctagaaaaaaacaaacaagtgaaggaaacaattcaaacagttcacagtttgaaagcagaattagaaacaataaggaaaacagagaatgaggggatgctggaaatagaaaggctgggtaaatgatcaggaaactctgatgtaagaataaccaatagaatacaagagatggaagagaaaatctcaggtgttaactcattaaaggatatacagtcatctaccaaggaaaatctcaagtccaacaaatccctcacacaaaatagccaggaaatatgggataccatgaaaagaccaaacctaagaataatgggtatagaagaaggtgaaaatattcagctcaaaggtacagaaaacatattcaacaaaatcatagaagaaaatttcccccaacctaaagaataatatgactatgaaaatacaagaagcttacagaacaccaaatagattggaccacaaaaagaagttccctcaccacataataatcaaaataccaaacttacagaatgaggaaaaatatattaagagcagcaaaagaaaaaggccaagtaacatacaaaggcagacctaccaaattacacccaaattctcaatggaaactttgaaagccagaagatcctggatagaagttctacaaatgctaagggaacatggatgccagcccagactactgtatccagcaaagctttcaatcattatagatggagaaaacaagatattctatgacaaaaccagatttaagcaatatatatccacaaatcaagccctacagaaactactgaatgaaaaactccaatgcaacgaagataactacactcaaaaaaccatagacaatacataatcccactttaccaaacactaaaaaaaaaagtggggaaatccacacacaataacaccaacaacaacaaatagaaaacaaacaagaatcaacaatcaatcaatggtcattaatatccctcaaagtcaatggtcttaacttgcctataaaaagatataggctaacagaatggatacaaggacagaatccatccttctgctgcatacaagaaacacatctcaaattcaaagacagacattccctcagagtaaagagtttggaaaagactttcaaatcaaatggacccaagaaacaagcaatcctaatatctaacaaattagacttcaaactaaaatcaatcaaaagagatgaagaagggcatgtcatacttcccataggaaaagtccatcaagatgaagtctcaatcctgaagatctatgtcccaaatacaaaggcacccacattcataaaagaaaattactaagctcaaatcacacataaacctcacacacttatagtaggagacttcaacaccccgctctcaccactagataggaccaccagacagaaaattaacaaagaaacaaaaaaactaacaagttatgacctaattggttttaacagatatctatacaacagtctatccaaacacaaaggaatgtaccttcttctcaatgccacatggaaccttctctaaaattgaccacaaacttggcaatataacaaacctacacagataaaaaaaaattgaataaccccctgtatcttatcagaccaccatgctttaaagttagaattcaacaacaacataaaattcagaaacgctacaaactcatagaaattgaataatgtgcaattgcaccattcctggatcaaggaagaaataaaaaaaaaaaaagaaattaaagacttcctagaatttaatgagaatgaagacacaacatacccaaacctatgggacactttgaaagcagtgctaagaggaaagttcatagcactaaatggccacatgaagaaactggagaatagtcacactagagaattaacagcacaactgaaagttctagaataaaaggaagcaaattctcccgaaagagtagacaccaggaaataatcaaactaagagctgaaatcaataaattagagactagaaaaacactacaaagactcaatgaaacaaagatagacaaattaaaggcagagagagaacatgctaattaacaaaatcagaaatgaaaaggggacataacaatggacactgaggaaatccagagaatcatcaggtcatactttgaaaacctgtactccacaaaatttgaaaatctaaaggaaatgaacaattttctggatagataacacttaccaaaattaaatcaagaacagataagcaatttaaacagacttataacccctaataaaatagaagcagtcatcaaaagtctaccaaccaaaaaaagcccagtgccagatggtttcagtgcagaattctaccagaaatttaaataagagccaaaaccagtacttctcaaattgttccacacaatagcagcagaagggacattgccacactctttctatgaggctacaattactttggtacccaaagccacacagagacacacacaaaaaaaagagaattacagaccaatatccctaataaacattgatgcaaaaatattcaactactggcaaatcgaatccaaaaacacatcagagaaatcatccaccatgatcaagttagctttatcccaggaattcagggatggttcaacatatgaaaatccatcaatgtcatctaccatataaacaaactgaaaaagaaaaaccacatgatcatcttgctagatactgaaaaagcctttgacaaaatccaacatccttttatgataaaggtcttggagagaacaggaataacaggaacatacctaaacatgacaaaagcaatatacagcaaaccaacagccaacatcaaactaaatggagagaaactcaatgttcctctaaaatcaggaacaagacaaagctgtgcactctctccatatctgtcccgcgctatggcctcgccagcaagaaccacacaggacattcggatccttctgcaggaaagctttaatgcgtcttgagaggagagcataagcttaccagagcggagaccccgagccaagaatcccgtcccctaataaaggctggcagccgccgcctgggacgtgtcaccctatgattggcttcagctcctcaggccatatgacgccacggaataggcagagatcaaggaaatggaaaattacccagcgcctgcgcaataatttacattcagtgcctgcaggcgccatcattgtaatggagaatgcagggacggctccctacacatatctcttcaatattgtgcttgaagttctagctagagcaataagacaacaaaaggagatcaagggaagagaagaagtcaaactttcattatttgcagatgatatgatagtttacataagtgaactaaaaaactctaccaggaaactaccacaactgataaacaccttcagcaaagtggcaggatacaagattaactcaaaacaaatcagtagccctactaaatacagatcataaatgcgctaaaaaagaagtcagagaaatataaccctttacaatagcaactaacaacataaaatatcttggggtagcactaaccaaaaccaaggaagacctgtatagtaagaactttgagtcttcaaagaaacaaattaaagagtataccagaaaatggaaagatcttccatgctcttggataggtgggattaacatagtaaaaatggcaatcttgccaaaagcaatctacaaattcaatgcaattcccatcaaaatcccaacacaattcttcacagaccttgaaagcacagtactcaacttcatatggaaaaacaaaagacccaggatagctaaaacaagcctgtacaataatggaacttctggaggcatcaccatccctgacttcaagctctgttatagagccatagtcctgaaaacagcttggtattagcacaaaaatagacagattgaccaacagaattgaattgaataccttgatattaacccaccactatgaacacctgatttttgacaaagaagctaaagttatacaatggacaaaagaaaacatcttcaacaaatggtattggcataactggattcagacatgtagaagattgcagatagatccatatctatcgccatgcacaaaatgtaaatcccaatggatcaaaaacctcaacataaattcagccacactgaacctcctagaagagaacataggtggtaccctcaaacaaattagtacaggggactgcttttttaacataacacaagtagcacaaacattgagatcaacaattaataaatgggacctcctgaaactgagaagcttctgtaaggcaaaggacacagtcaacaagacaaaactccagcccacagaatgggaaaagatattcatcaaccccacatctgacagagggctgatcaccaaaatataaaatgaactcaataagctagccaccaaaacaccaaacaatgcaattaaaaagtagagtgcagaactaaatagagaattgtcaacagaggagtctaaaatggctgaaagacacttgagaaagtgttcaaaatccttagccatcagggaaatacagctcaacaccactctgagacaccatcttgctcctatcagaaaggctaaaatcaataacaccaatgacagtctatgctggagaggatgtggagaaagaggagcactccattgctggtgggagtgcaaacttgtgcaaccactttggaaatcagtatggtggtttctcaggaaaatgagaatcagtctgcctcaagatccagcaattcctctcttgggcatatacccaaagaatgcacattcatacaataaggacatatgttcaactatgttcatagcagcattatttgtaatagctagaacatggaagcaaccaaatgcccctcaactgaagaatggatagagaaaatgtggtacatttacacaagagtaaatagagtagtactcagcagaaaaaaaaaaaaaacaatgaatcttgaaatttgtaggcaaatagtggaactagaagaaaccatccttagtgaggtaacccagtcacaaaaagataaacatggtacatactcactcatatatgatttttagagcacactgccagaggagctaagaaacaaggaggatcccaagagaagattgcatagtccctcaaagaaggggagggggacaagaacccctgaacaaagtgggagcatgaggcatgggttgagagaaaggaggtgggaaaaaggggagggggaggagaacaagaggactgagacaggggaggaatagaggagggcaagaaaggagatgccttgatagagggagacagtacaggtttggagagaggtctggcacaggggaaatgttagtggattcacagggatgaccccaactaagaacaaaagcaatggtagaaaaaatgccatggatgttcttcccctataatgagattggcgtctaccttggttaccattcctagagccttcatccagtagctgtttgaagtagaaacaggcacccacagctaagcactgaaccatacccctggaattcaattatggagagggaggaagaatgagcaaaggagccacggcggtgctgcagaaacctgcagaaacagttaacctgacctagtaagagcatggagaccctagtcttaaagctggggaaacagcattggactaaatcaagccccctgaatgtgggtgccagttaggaggccaagacagtctatgggagctctaaagtggagccagtctttaactctagagcacaaatggactttgggagcctattccctatggagggatactattgcagcccagatacagcaaagagggcctaggccctcccccaaacgatatgacagtctttgaaggtccctggtggagggcctcgctatccctggggaggagctggggatgggttgggtgagggttggtggggaacatgagaggatgggagggtgagggaatggggggatggatatgtaaatatgagtaataattgaagaatttaaattttaaaaaatcaatataaaaaacaaagaataaatataatcagtacaaaacaataaagtcagtaatgtggatgagaaagtgagcaaaacaaaccagaaatttaaaaacatggaaaaaatgagtgggattcaaaaaaatggaccaaatagaaatgctagaggtcagagttattattcaaataaaaatatagtctaagcattactgacagactagatgaagcacaggaaaaaacatcaagcatgcagacaatgttgatgaattagagccctcagacaacaataaaaatgtcaaacataagcacaacatcccaaatctctgagatgtgatgaaaagaaaaacctaagaacacacaaggtgaaaggagctgaaatcaaaaccaaagccactgggggcggggagggggggtgttcactaaaataatagcagaacatttcccaagtctagagaagataatggccatgtaactagaaaaggcattttaaaaacccaaagagacatgacctgaaaggaacctcttcaaatacaccatcattaaagtattaaagctacagaacaacaacaaatatattaaaagctacaagagaaaacctgtccatgtacatacacaagaaatctcatcataataacataggacctttcagctgaaacctgtaaagaagaagcatacagagtgatatattccaagcccttcaggtatgtaactgccaactaagaccattagatctaattaaagatatttttaaccaatggagaagtaaagagcttcaaggtaagtaaaatggaagtaattcatgtctgctgagcctgtattacagaagatacacaaaggaattctacacacaaaggaaaagacagtcacagcataagaaaaccaataataaatctcactaaagaaataggtaactaatgaaaactaagactaatcgaatatgcccctatagtgagattgatgactaccttaaatgtcatcctagagccttcatccagtaactgatggaagcagaagtagacaaccacagctaaacactgagctgaactcctggaatccagttgcagagagggaggactgatgagcaaaggggtcaagaccaggctggagaaacccatagaaagagatgatctgaacaagggggagctcatgggccccagactgatagctgggaaaacagcataggaccaactcagaccccttgaatgtgaatgtcagttaggaggcctgggcagtctatggggcctctagtagtggatcagtatttatccatagtgtaacgaatggactttgggagcccattccacataaggggatactctctcagcctagaaacacagggaagggcctaggctctgctccaaatgatatgacagactttaaagatttccccccatggaaggcatcaccctccctggggagcagaaaagggatgggataggggtttggtgaggggcaggggaggaggggagggagagggaactgggattgacatgtaaaacaagcttgtttctaatttaaattttttaaaaaggggggggaaagacttacatagactgaacctcaaaggatgaaatgccaaacaaatggaccaggaaacagcccactgttatacctagcaaagtaaatgtccaaagtcactacatcttaatgaagggggcagtctataaagaagttacaactgtaaatgtaaatatttgtaatcaatgttagtccacctaatttcataaaactggacacagagataagtacagatacagtaatggtaggtgactgccatatccactttgatcaatcaagactaaagaataaatattgagacaatcgcactgctgctagcagcaagatttcttgatatgctgcattccatacctccaggtagcaacccccactaagccaccagccattccatataaccctgcttcccagcagcaggtgactacatggtgccctgtgcccctgactccaggtaggggtcctgatcttggccacagtatcactacatcactgccactgtgtgctcacctctgcaaggtagcaccatccattccagctagactctagcccctactacctaagaactacttgtggaacccagtgagtcttccacaaacttctgagactcagcaatgacaaccatctaactccacaggaaggtttgctctttggctcagaacctgtacctgatcctagctgaactagaactagttaggcatcccatttgcacatcaacaacgaaccatcgatgagccccaaacaccattcaaatggtctataatctgacaagttgaaatagtagcaaatagacattctaacacccacacagcaaagacaagaccagacatctataccaagaaacacttccatgtcctaacttcagatgcctagggctcataggaaaaacacaaacaacatgaataagactatctgcctcctctgaaaatgaggactcccatagcagtgttccctgagaaaagcaacttagatgactcacaagacaaaaacttcaaactagcaaatatctaaggatcaagcaactcaaagaggataagaataaaaacaaaatgaagactaaaacacagttgagtgaaataggaaaactttctaatatacaaaaatagaatttaataaagagatagcactttgaagaaaagccaaactgaaataaagcttaaaatgaaattttctgtaagctaaagaaaatgcttaatggaaaacctcaaattgaaaagaggacttgagggcatgcagacaagttaaagaactggatgattcagtcacagaaaatactaagtctaaatactaaattaaactcatgaacaggaattctgggacatggatttagaaaaaagagaagatacccagaaatacatccaaattattttcccaaagacagtgttatcctggtttttaagagagagagagagagagagagagagagagagagagagagagaggctggagagatggttcagttgtgaagagcacggactgctcttccagaggtcctgagttcagttgtcagcaaccatctataatgggatctgatgtcctcttctggcatctaggcatccatgcaaacagagtactcatacctaaaaaataaaatataaataaataatttttataagagacaaaggcccaaccaaaaaataaataaataattataggccaatgtctctgataaagatgtgaaattctcaataaaatacttgtaaacaaaattcaagaaaacatcaaaaagtgtatctaccatgatcaagttcactccatcccagaggggcagagatgaaatcaatagatatatcctaccatgtaaaccaactcaaggacagagaccacaagatcattgaaggcaggggtttaaatgagttcaccaggcccaagataaatgataaataggtgtttattagagaaggactcacacagataagagtaaataaccaccccccaccagtcttcctgctgcagaagatgcagtagctgccctctgatgctttctgaaaccccagacatatcaaatcatcttttagatgaagaagagaccttataacaaaatccagcatcacttcataataaaagtcctaaagaacctataaatatggtagacatctcagctttaaaagcattatacaagcctacaggcaacattatgaagcacctccactaaaatcaagaccaagatgcccacggtctccattcctgttcagtataatgcttgaagtcttagctaaagcaataaaaaggtgaagaagatcaagggtctacaaataggaaagaagaaatcaaagtatccttgtttgcagatgaatatatacatatatatatatatatatatatgcaaaatctccaccaaaaaatgccaatagctgacaaatacattaaatgaatgatcccattcataataggcttaaagaaataaaatatcttggaataaatctaagcatggaactgaaagacttgcataatgaaaatttaagacattgaggagaaactaaagaggtcaccagaagatggaaagacttctaatgccagttgcttggtaagattaatattctaaaaataacaactctaccaaaagtaatctacagattctacataatcctcatcaaaattacaacacaattcttctcagaaattgaaacagtaatctttttttaaaaatcatatggaaacacaaaagacacaggatagccaaaaaaatcccaaacaattgaaaaaaaacataaaaacaaacaaacaaaaaacctctggaggatcactattccagatttcaaattctactagagttttagtgataacaacaacagcaacaacaaaagcatggtataaccataaagatggactcacagatcaatcagcagaatgggattaaggtaccacatgcaaacccacactcctatagcgcactcctatagccagctggttttttgacaaagaggcaaaaatacagatggagaaaagacagcatattcaacaaacgatgccggtcaaactgcatagctgaatgtgacccagaccaagaaaggaaaacattgtatagtctctcttatatgtggatgcaagctttgtattttcaggcatgtgtgtttaaattagaatatccataaagttcaggaaactagtaagagatcacagtagagaatgatttaaagaaggaagggataaaatgaaggtaaaggtttaaaggtagaatgggaaacaatataccaagaagtatttagtggtgtgggctggaagggctggagaggcataattaatactgaaaacctttgaaaagtcttatggaagcctacaactgtagaagcttcctaaagtattttgtgaaatatttaactatgtaaagatgtgttgtatttatttatgttgtggaatattagtttaactgtatacaggtatgttacatttttgctgcatttgtttaaagatgtaaggatgtgttatatttgtttatgctaggtttgtttaattatgaaaagatgtgttactgtttcaccttgcctgcctaagatacctggttgggctaataaagagatgaatggccaatatctaggcagagaaaggataggccagcctggtggccagagagaataagtagcaagagaaatctaggcttaaggaaaaagagagaaaggaggaagagagaatgagggacaaagagagaaatgcagggccagaaaccaggcagctggaggacagacagacacaaaagaagcaagaaaagtaggacctacagaaagaaaaggtaaaaagccccaagagaaaaaaagatagataaagagaaacatgttaatttacattataagaagtagccagaaacaagcctaagctaggccatcatcataacgaataagaagtctctgtgtcattatttggaaactgggtagcagcccaaaagaaaaagcctggtacaaaaatatacacagatagattatacttctggtactgtgtgttcaactgccctgttgtgtttggaacacattatttggatattctcatctgtctctggttcttatagtctttatatttttttccttttcctaaaatctctgaaactggaatttagttcagaggaaatgttccagtacttaacctagtgccttgtagctgttttagtataataatgtgcaccaatgccacacagggcactaaaaacctgggaatgtgaagcctgaagcttgtcttattgtaggaagaaaccacccacctgcctctgctgtaagcctggtctgtttagatagaaatgccattagttaggaatggttacattttaaagccatagattctgttttaagcttggtttgcatgtgcgcacacgcacacacacgcacacacacacgcgcacgcacgtgcacgcaaacctactcaatgtttagccataccatagtaaatacatcaggatattaatcatgtgtcagggtccattgccacatttgagtacatttggaacagtgtgtgtcccaaatccagcctagcctctctgtctctctgttaaggtcacaggaaaacaggaaagagaacatattttatgctagtgatcgagacttcagggaagacattttaaggcagacatgtgctgcttttctaaccctgtaaattgcccccactcaagatagtgatttaaggctgcagacctcacttttcaggaggatacagtctggattcaacccacaaaatgatagtatagtaattaaggtctcagtggaacactgcttccgagtttaacaatagctaaataactggcaagaactgatgacaaataagaggtccaaagctattctttattctctgttctggagatagtctgtatgttataagtaaagtttatcaaaacacacactactggcttatactctattttagaacaaattgatttgacagacatctatgtccactcaaaagctgcaggatgtccattctactcagcagcccaggggactttctccaaatgaatcacaaagtcaagtcttataaaatgagggcgggcggtggtggcacacgcctttaatcccagcactcgggaggcagaggcaggtggatctctgcctgaatgatttttaaaaaaagaaaaaatcatggaagaagcaaactgcttttcacttccttactttcactctgatggcacgtccatccactctgctactgtcgcattccttcactgatattagaaccagattcatctgactcccaacatagaatgaaagccagcagctctccagggatctctagccttcagagattggaactacctagtaactactgattcttggggtttgggtgtggaacagccattgttgtactacccagatcatatcatgaaaattaacctaataaatcccatatataagtagttgtatagactaggttggccttgagcatatgtgtgtatacatatatatgtttatatactatttatatatgtatgtgttctgttcctctagagcaatggttctcaatctgtgggtcaccacctcttgggagtcaaatgaccctttcacaggagttatatatcagataccctgcatatcagatatttacaattcaaaacagttgcaaaattacagttatgaagtaacaatgaaaataattttatagttggttcccccataacatgaagaactgaattaaagagtcacagcattaggaaagtttagaaccactggaccctgataaatatagtacatatactatattaattatcttaccaatagcaattatttcagtatatgtacatatattaaaagatcagggtgtgtgttttcataccattttgtttgttaattatacttcaatggaatgagagaaaaatgggaaggggaaggaagaaagaaagaaatggagggaggagaaagggaggaagggaacttgggggagtcttaaattcttggccaaccacattatcaaagaaccatgacttttattttaagcactatttcttgcagctgctggacaggtgtccttacacagagtctgcagggtctacccctatgggtttctaaaatacaatgaaagttgaattccagcctcacctaagagttttgtgagagagctggagttactagtttgaaaataattgggtctcatgaacaactataggtaaatgtacaattctgaaaatttcaagtaactaattctctcaaatgtcatggagccccctttattagcaagattgtcaccatctttgagaagacttttatggttgaacttgaaaagcctgcactgattactttaagtgctgccattctcattctttatccatcatctccttgctgcttgcaaacctgtaacacaaatcagatccctacaaatttcaggtctgctccaaacccagaaggaaaggttgatgtgccaagagaactgcaagtgtgcataaatttataccacatattctcaggggtgtatgcaggaatagagtccaacgatataaacaactttgggggagaagtaatttatggggctggtatttttatatgagtacacttaacagattctggactcacaatgctgtctgagtcattaacaatggctctgactgttcaactaattaacaaagctcactcttaattgggctgaactgaagctggtggcaaaagttccttaataaaatgtggacgaggaaccctaaagattgagtaggcaggaatggtaaaacggacttactagttgtccacccactaatgattggtttgaaggactctagtgtcagtctctgtggatgaaaaatgcagatggaagggacagttattaaagtatttcctaacttcagttgcaaccatgagatcttgaatagcgttggccaagcaatctcttaactctatgtaggatacacagtggcaatagtcatagaggtagacaacaatcttaaatgaccctcaggaaaaaaaattgatctatgcaggtcttttttacattttattttgtttatttttttaatttaatttttttcaaggcagggtttgtctgtgtagccctgactgctctgggactcactatgtaaacttggttggcctcaaattcaaaatccacctgtctctgcttcctgagtgttaggatttaaggcatgtaccactatgtccagcttgaatttcaaagttttaattaaattaagtttttattattgaattttcaagaaaagtctgtttttgatgattctccttcctctctttcatccctgagggcccttgttcctttccaccctgccataattttctttctacttccttgtcccatgtgacctactttgctccatgtttcctcagtgctcatttcccttctcctgttctcttttctagtctcatgacctattcctgcattcacttcaacttacaaacatataaacattataaactaggatccatatatgagagagcacagagatgttagaaggtacaaggaatgactgtgctcctggattggcagaatactgcattcaattcaatttttaccaaagttctaatgacattgttcttaaacctataaaagtacatctgaaaacacaaatgggaacagagaaggccatcaaaaccaaataatccttaagagaaagagcattgctggaggtttcgcaacaccaggcttcaagctatactatggagctacaaagataaagacagcatggtactggcacaaaaacatatgtagaccaatggagcagaacagagaacccataagaaaacccacacagtgggagccaccttattcatcagaattgacaaattcatcaaaacatgcatgagggaaaaggcagtctattcaacaaatagtgctgtcaaggctggatatcagcctacggaagaaaaacccagatctgtagcttgtttcttagacaaaagtcaattcaaagtgaatcaaaaatcttaatctaaatgcttgcacactccagttccttgccctgctctaagtttctcctcacaggcaagccaggggccatatccatatgcttttctggtgctcagtttctccacccacagcaccctttgcctgactcaggcccaggaaagagctctgcactgtaggtaggctttcttcaggaattccctaaagcctcttacctgatgctatgcttctctctctctctctctttctctctctctctctctctctctctctctctctctctctctctctctctcacacaccacacacacatacacacacacacacacagagagagagagagagagagagagagagagagagagagagagagagaggcccagcaaggagctgcacatgtgaactttctaggaagactctaagacccttcttcataccctacattgcttttttcccttactccacagcagccgcagtgcataaatcccattggccctgccttcttcccaccccttcctagaaccttccccaagcactgtaccacacatcattggttccacaccacacctgtcccagaaccacatacacacacacacacacacacacacacacacacacacacacacacacacacactgcagaattggaatcatcccagcctctaaatcaaaaatcaaccctgagtatctgtgctggatagttttatgtcaacttgacacaaactaaaatcaccaaagaagtgggaacctcaatgaagaaaatgtttcctgatggttgttggtggtgtatgcctttaatcctagcacccgagacacagagacaggccagtctctgtgaattcgaggccagcctaatctacagagctagttccaggacaagctccaaatctacacagagaaactctgtcttaaaaaaaaaagaaaagaaaagaaaggaaggaaggaaggaaggaaggaaggaaggaaggaaggaaggaaggtaagaaagaaggaaggaggctgagcaagccagtaagcagcatccctcctcggcctctgtttcagttcctgcttccaggttcctgccctgtttacatttatgtcatgacttcttttgatgatgaacaatgatatggaaatgtaattcaaataaatccttttctccccaacttgcttctggtcatggtgcttcaacacaaccatagaaaccctaactaagatagtatctgaagaactaacttgcaagctccttgcatgtgacctgaaatcaaccaagttttgctaacagcaaaacacaaccaatctcctactcagcataggtggacagaaaatcatacacaaaatgaacaaactagctccacgtgcccaggtcccattgcaaaagcacaaacaatatcaaagactgagatagtatggttccaccctccaccctaaaaaaaaaaaaaaaaaaaaaaaaaagctgtacaaaagagatgttcagcaatggaagtcatctagatgtgaacttcaggacacagatttgaaaataacaattataaacatgatcaaagaatgcaagtttaaagaagacacaagcaaccgaatgatctttaagaggacaagaatagccgggcagtgcaaacctttaataccagcactggagaggcagaggaatgcagatctctgagttcaaggccagcttggtctacagagtgaattccagaacagccagggctacacagagaaacccagtctgaaaacatacacacacaaaataaaataaaataaaataaaaataaaagaggataagactaaaactcctgactgaagatcaagaaaatacacatagctggatgaaataatgagaattcaagaagtgaaaaatataaaacatgttaaagaaaactcaaactgaaataaagtttaaactcaaaccgaaataaaactcaaactgaaataaagtttaaaatgaaaacttcaataacctaactcagtagaaagcttcagcagcagaacagcttaagtagaagatgaaatatcagatttaaggacaaagaaatagaactggaccactcaagcaagagaatgataaaaattttaaagcatgtgagaggagcatgcaagaactttgggaccatataaagataaaaatctattaattacaggctagagggagaagaatcccaagtaagtggtatagaccagatcttcaacagtaacataaaagaaaacttttccaactaggggaagatacacccatttagatacaatagacatacaaaacaccaaatagacaaaaatatttttaaaattatcttggtatatcatagttaaaacactaaacatacagaagaaagactattgaaagttgcaagagaagtagatgtaagtcatacatagaggaaaacccatcagtacaacagctgacttctccagattttatttattttatgtatgagtgttccatctgcatacactcctttattccagaagagggctgggaattgaactcaggacctctggaagagcagccagtcctcttgacctctgagccatctctccagcccctgacttctcaatagaaactttaaaaccaaaagagctagaagcaatatagcccaagtcttagaggcctacagatgccaatgcagactactttacccagctaaactattacatgtagttgaaggagaaaggaaaacattccttggtgtagacaacttaaagagttcatgtttaccaaagtagctctacagagaatacttgaatcaacactttagactgaaaaaaaaacagcacagccaggactgctgtgagattgtggttcctggaccagaagctgcaccaatgataaaaatatggctgatcaaacaagaccggaacaaggatgacaacaatagacgtgctaatgtggaagggggaatcacagggagcctccccctagacaaagagctaagcaaggtgagagatgctgagaaagggagaattctcttccccaaggatgagtcccctaataggttatccaatacccagttgtcagccctaaaaacataaacatatgcatacaaacaacactgaatggactcagcatgctgtatttatatacatatacacacacaaagagagagagataggtatatatcttacattattacatattatatataatcaagcaaaagtaatcaatgaaaaagaggacctaaatttgagatggaaggggcatgggaggggttggagagagatgaagcaaacaggaggggttagaaagagaaaagggggaaattatataattatattttaattaaaaattttaaaagaggctacagaaaggaaacaaatggcactaggataatttaaattcaaaataagacaaaggacaggaatagtacataaaaacagcaaaatgacagcaaatcaatcaacacacaactctcatttataacttgaaataacaatagcttcacatttccaatcgaaagtcacaacttgttgaagggattaagaaacaagagtgatctcatctacaagaaatacactttatctttaaaaacagatgctcccatggagtgaaaggatatgtggggcggggaggtattccaagaaaatgggaccaggaaacaagcagaggacagtatccgaatgtctgacaaaataggctccaaccaaaagtagtaagagataaagaagggcatttcagcctggcaagagaaaaggcaatgcagaagacactatatttctaaactatatgcaccaaactcagacacacccaatttcatttcaaaagtactacttgacttcaagccagagattaataccaatagtatgtgatttcaacacaaacataaacaaataaacaagtaaaacattgaaataccacaattataaaacctaataagttcaacttgtgtaaatgtccctgcacccaagcttgacagtcaacctgaagtccatccctagaacccacatggcaagagagaacaaacgaccactggtcaacctctgacctcagcactgaactgtggcacacacccccaacacatatataaccctctactacacatacaaaaaaatacatgtaaatgcaatttttaaagatacaggtataggcaagaactttccaaacaagactctgatgcaaggaattagtaagcagactaggtgaaattaaagtttctacatgtcatacaaattatcagcaaactaagaggaagcctatcaaatgagagaaaatctttttcagctaaaacctctttcagacaagaggttactatctagactatataagttaaacaacaaaaacgaatctgccaatcactaaatgggctagtgagatagatgacagttctcaaaagaagaaacacaaattgcatgtaagttctttaaaaggtgttcaacagtctcagccatcaggccatcaaaactactctgggattctgtctcaccccaattacaatggctatcaccaaaaagcagacactacaaaatttggtgaggatgtcggggaaaagaggaatctttattaagttctggtgggggtgtagtcttgtacagacattatgaaaatcactggtggaggtttctcaaatcttaaacatagaacccactatttgatctagctaaccactcctgagcacataccccatacactgtatcctgtgacagaaatgcctgcacatctgcggtatatcattcacattaaacaggaaatggaatagcctagatgtccatcatcaggagaatggataatgaaaatgtggtgtttatacacagtggaattttattcagctgcaaagtaaaatgaaattttcaggaaagtgggaaaatctggcgagtattatattaaataatttaactcagactcagaaagacaaaatcacacgttctttctcatatacggatcctagtgtataatgtttaggaggacctttgacagcgacttataaatattgtagtcccttagataaagcatgattgacatcacactgattttcaagaaacacatataaaagggaaaactgcaggcctaacactagaatgtcataatccttccaccaattccaggcttgagtcactgtttaactgaagggctccttgacttaagaggagttccagtacctttgagaaggacgctaaaaggtgaattagctgtgtcagaggtgtgactttgggtgggaaaagacacgctgaccctcaggagaatgtataaaaccaatattaatctgggagggtcctggatgccactgtcatccataggtgctccataagagatacctctgtgagtcacatggtattagctttgcattgggttgtaggatcttggaacccactttgtaggcttctccccttttcctgtgttttcaaatgaaaattgacatgaactggctcacactggttttctgaaccacagagtaaatatttccaaaaataagctctttttaaaaattatgtgtataagaaaactagtaagaaagtggtagtaacattatatctatttaacctggctatttaccatttgtagtagatggttgttttatagtgaataagagcctttttaaaattttaatcagatgttaatcccagttacagctgctatttccatttcagactatttactggaaaaattgcatgatatttggcatgtgatgcatagctacctgcctgggaaatgctctatttttttaattccattcagtataaatccccagaagcagtttctttccccaggaagggtctgcagacctgcagccttctttcccatggagttctgtctactctcggaggttttaccatcattactgtacagggagtttgattacttatcaattcccagaacaccataattgtgacatgaatgacatcgatatgcctggactgaaagtaagctagggactataaaacaagtgttggaactgagttccactggaatatagtaattgccccttgactaaacttcctaatggattgatgttcacctcacttagacatatttttaacattcatttgagcactctgtaaatatgccagctttaactactgtacacaagagtaagctctcagctccaaagatccaaagcaaacaaagcttcctgttggcctttaggacccaacaaatgcaatgatatttacaatatctactacaaatcctgatgttatggagtagcagtcacaagtctaaatgtctgccataaactggggtattatgtagtgactcttagaaatataaacagtaaatcactgtttttctaaaaatggttcctggattgttcttgaaccctgcgaaggtggacaacgtaactctaagtaaccataagatctgaggttcatgtggtaaattagaatcatctactgaactgtagacaagaatgtatcctgtgtgtagcttatggctaaagatgttttgtgtttagtaataaactcttgtaagccctgacaacagtttaagagagaaaagctatgagttggttcatggttttagagcattccatccaccaccccaggaaagacatgacagagcaactcagatcaccctgatgggtgccctgtggccaagactgttcacttggtggcagaccagaatcaaaaagcaaggctagaatgagaagccagttatactctacaaagcctcactcacaatgactcacttctgcaagccaggggcccacccacctcctgaagttctgagaaccttccaaaatggcaccattagctggggcccatgattattttaatgttcagatcttcaatgccctgaatgaatgagtatgaaaatactgaaggaataccatatggttaagatgactcaaagtaatccaagataaagaagatctgagctcaacttgtgtagcagtcttgcagtgaacttgtagcagtggccacacctccttggccatggcctggggcagagggaagctagaggtatggttttcctttttgcttcctttctggtggggcagtcgatccaggaggaagagcagagaaacactcccccccctccgttcttggtatttttctgtgtaattgttcccccaataaacacccatttatcatttatcatgggtctagtgaaacaattaaatcatcgccttcaaacatgaatttttcaaattcatagcctctttttctttaattgtagagaggcatatcactggaagccaatgctcccttctattatgtacctgagcaatttacttataaaaagaaaaggttccatttggcttgtggttctgaagattccaactcattgtcaagtggctgtattgttttgggtctctggcaaagtagcacatcacaggagaagagcatgacagaatgctgcttatgtcatgagtcaagaaggaaagtgtagaaatagaaagaagggaaatcaggctcttgtaattcccctctagctcaggctttcaacaacctaaagacctcccactaggcactattcctaaagcttgcactatctcccagcactgccaccatggggagcaagcctttgggagacacagaccactctaactgtggtaatgtgagctaccttaccagggcattataccctgacttcgggatgggggatgacagacataccgaaaggatatccaatgcttctcccttgttctaatgtattcaccttgtttttaagatattctgtgtcctaaagctatacccatgaagtctcaccagcagggtgccttacatgttgtcctgagtaaggacaacaccaatagacagtctaagttggaaagaagaaagctcataagtcctcaaccctagaaaaacaactagagacaactaagagatgctgagagtggggaaattagtcttttccagggaagggaacatcaattgatatccaatactaatgttggccttgaaaacattatacaaattgaataagatatacatatatgtgtagatgatatacatatatataataagatatacatatatatcaacaattaaagaaaaagaggccatgaatttgaagcacctgagggagttggagggaagaaagatttgaggaaaatgatgtagttataatctcaaaaaatattttaaaaagttatcttctctgtctcttactatttcctatagagtatgctagtgatgaataatatattaacatatttatgggagatccaggcaggattctgatgaaccagaatagggatcggtagacatctttctgaagaagatcctgaagaaaactggcttggctttgtgtggcatgaggcatctgtaccactcagttctgccactggccacaaaaggagccacagacagtatatcaacaactgaacatgcaaagaaacctattttcaaaggagaggggtggcctggatttgagctggaaactgtagtttgtcaacccacagagtagaggataagtctgcaacagaatgtttgtggtgactattgagacctagatttctcccgttgggaaggtagtgagaggctgatgcaatccattttgcaggaaaacatttttgttgctattgttgctttggagttgaattgcagctttgggcagacccagccaagcgcagctgatggggtgcatgaaaactgacttactcaactcctaacccaagccccctttactgtgctttttccttacagaagcaactagaaagtgaaaatgtgtttctaagaattgttagcagtggggctttcccatgtgatccgtgctccatcagaacacacatttatacagacccagaagcgggagtgagtaaaaggagaagagcccaaactccaggcatgttcaggggcaggggaacccattccctgggatagagagccagttcccaaggcaggaggaccagtcactgaagctaaatgctacagctcggactgctaagactgggcagggaacaacactaggaggaaaggacgccaaggctaatttttaagcagggagaccagatatcccaaacagccctgttgtctacgtttaccatccaagttccattaaatggccttccctccaagaaaagcaaatactaataagcactaatttcataatataaaggtctctctctgatactgttttaataatttttcattacccaacaactagtttaatgcccagcatagtcatcatactttaatttttagtgaactaaaattgctgccttgttattatcctacatagacttgaaaattacctgaaagatacatagctaaagaatgttagcatcattgtaccaattttattttccctacatcagccaacttctgggattttagcaagagggacgaaagcttttgaaataaaactggagaaaactaaggttccattgacaatcatcctgtcacttacaagaaaagccacacctccagaggtagagctgggtgcccacatgatggctagggtggagcagtaatggccatgtatgtgccaaacagttagccaggaatattggcacacacatgcaattgcttgttaatgattaatggtcattttgcatttcttacctgcaaagcctacatattaggaggcatttaacctagagctattgtgtatacactaaaggagggtatacaccaaaattttttcttatttcattgtcatcacaccagtacatagatataatttaacctttgcagacgaccaaagctgtgttgtccaaaactgttgtccaacctgagtcccccttgcttccaaaactggctaagctatgagcaacagacattttaggaatgtccctctcccatgggcttagctcaacctggagagtctgtccctgtctccaggccaccaggtactcactccctttgcttcatacagatctgcttgtctctgcacatatcacagttttcaattattcactgtatggccattagaattttctgtctctattagctggcaggctagctgaaggtgcatggacctctctctttatatctccagtacacagcacaaaagcccacaagtagtctgaacgaagaaacgagtggctacacagcacctggaatcacgctaaaactttctcttatcagtctttacaagccagcgacttctgcaccatattatctccatggtgcaaagtgtggacactgaagagcatcacatacaaatcaggggtcccctcccccatttggagtggcacaagcatgtctcgtcccactgtcttgtggccctctattgtgtttagatgtccaataaacgaatcactcccctctgtaccacatggctcttgcagtaatcaaaactgatctgagcatgtagtgagtgcctcttcccactgtgtcacgttttttctgcaggtcttcatttgtttctctagctttctgtaatggaatctcgattcccattgcagaggtactaaagcaatgggaccttaatagggaattgggtccggggaggatcttacccaaagggattaatgctgctcttatggagtgggtgaattctcttgacaacctctgagtcccccttgcttcctgttttattaggattctgttctcttctcccacaggcttctaccaggttctttattctcttatcatacagccagaagaaattcttcaaaggccaaagtggagaaactgtctgcctcagactttcacccactaatactgtgagggttattatcatcatcatcatcataatcattattctcataatcataatacattacatccctaccacagcctcccctcatctcgttccatcctcagttctcccactcaccttctctgtcccccgatccactcctcctccattttctttcagaaaagaacaggcctcacagggatatccaccaatctccacagaccaagttccaataagactaaggcacaaaccctcatatcaagactgactgagacaacctaatagaaggaaaagagtcacaagagcagacaaaagagccagagataccccaactcccactgctaagattcccccgaagaacaccaagttacacaaacataacatatatgcagaggacctagctcagacccaaacaggctccatgattgccacttcagtctctgtgagttcctatgagccttgcttagttgattctgtgggccacattctcatgttgttctcaacacctctgaatcctacaatccttcctcccctcttctgtgagttttccctggctctacctaccgtttgcatctctgcatctgctcccatcagttgctggaggaaacctctctgatgacgatttggctaagcaccaatctatgagtacagcagaatttcattagaaatcatttcgtttactttctttttctattccatgtctctgacctacctaacctctggtttctggctatctagataatgccaggcatgggcttccttgggcaagtcattggccggccacttccacaagttctgtaccaatattactccagcacatcttgcaggcagtacaaattctagcttgaaggttttgtggctgggttgtcccagtcttaccactggaaaccttgcctggttacagatgattgctggttcagactgcataacccccattactaggagtctttgctggggtcaccatcatagattccagggaatttccacaggactagtactgtgaggtcaaaaaacaaaaacaaaacaaacaaatttttttcttgatatactgtactgcctgtggtatggtatcatagtaaaggaaaacagaagagcacactatagcatattccagacagtagcttcatctagatcattactgttgttcatataaaaatgaaaataaaatgaaattgcagtaagacaagcaagcattcagaaacagtgtgactgcgtgtagacacttcaacagtggaaagaaatgcaacatcgggccagagctgtgattctttcaaacttctctggtaaaatgctaggaattctaaaacagcctttgtaccataaaagcttcagactgggatctacaagtcctattgtatacactgaccttttgtaaaaccatagttccttcaaggagtcattttacatttctttttttttcttgatttataacttattttgtttgttactatagaaatttcatgaaagtgtttccacagtggaacatggaatgtggggtaacgtaaataagagttccctactcatggacatcactcactccagggtgggctttcttttttttctctctctcagatatttttttaatttgaattagaaacaagattgttttacatgacaatcccagttcccttctccctcccttcctcctttcgctccccatggatagtgaggccttctatagggggtcatcagagtccatcatatcctttgggatagggcctaggcccacccccatgtgtctccctctattatggtatctccattcttgttatcttctatcctttgcctgactcaacatttctgctccctcatgtcttctgcatccctcctcttctccccttctcattctcctagctccctcacccctcttcccatgctcccaatttgctcaggggatcttgaccctttccccttctccaggggaccatatatgtctcacttagggtcctccttgtttaccagcttcactggcagcatagattgtaggctggtaatcctttgctctattctaaaatccacatatgagtgagtacatatcatgtttgtctttttgtgattgggttatcttgctcagaatggtttcttcaagttccatccattttcctgcaaatttaaagattccattgttttgttttgttttttccactgagggtactccactgtataaatgtaccacattttctctatccattcttcagttgagggacatctaggctgcttccagtttctggctattacaaatagtgctgctatgaacatcgttgaacagatgtccttgttgtatgaatgtgcttcttttgggtatatgcctaagagtggaattgctggatcttgtggtagactgattcccattttcttgaggagtcaccatactgatttccaaagtggctgtacaagttggcactcccaccagcagtggagaagtgttcctctttttccacatcctctccagcataaactatcattggtgtttttgattttagccgttctaacaggagtaagatggtatctcagagttgttttgatttgcattttcctgatggctaaggatgttgaacactttcttatgtgtctttaagtcattttagattcctctattgagaattgtctatttagttctgtaccccaatttttaattggattgtttggtgttatggagactagcttcttgagttctctgtatattttggagatcagccctctgtcatatgtggggttggtgaatatcttttcccagtctgtgggctgccattttgtcttgctgactgtgtcctttgccttacagaagcgtctcatattcaggaggtcccatttatcaattgtgatctcagtgtctgtgctactggtataatgttcaggaagcagtctcctgtaccaattaattcaagggtatttcccactttgtcttctaataggttcagtgtggctggatttacgttgaggtctttgatccattttgacttaagttctgtgcatggcgataggctttggtctatctgcagtcttctacatgtctgcttccagttataccaataccatttgttgaagatgttctctttgttccatcgtacgaatttggattgtttgtcaaaaatcaggtatatgtaggtatatgggttaatatcagggttttcaactctattccattggtctacctgtctatttttgtgccaataccaagctgttttcaggactatagctctgtaatagagcttaaagttagggatggtgatgcctccagaagttcctctattgtacagggttgttttgctatcctgggtcttttgtttctccatataaagttgagaattgttctttcaaggtcagtgaagaattgtgttggaattttgatggggattgcattgaatctgcagattgcttttgggaaggttgccatttttactgtgttgatcctacctatccaagagcatgagagatcttttcattttctggtatcttctttaatttctttctttagagattcaaaattcttactgtacaggtctttcacttttttggttagtgttactccaaggtattttatgttgtttttggtaattgtaaagggtgatgtttcctgatttctttctccaccaatgtgtcatccgtatatagtagggctacagattttttttttttagttaatcttgtatcctgccactttgctgaaggtgtttatcagctggaggagttccctagtagagtttttctggtcacttatgtagactattatatcatcttcaaatagtgagagtttgacttcttcctttccaatttttattcccttgatctccttttgttgtcttattgctctagctagaacttcaaggacagtattgaagaggtatgaagagagtggacagccttgtcttgttcctgattttagaggaattacattgagtttctctccatttaatttgatgttggctgttggcttgctgtatattgcttttattatgttgaggtatgttcctgttatccctgatttctccaagacctttatcatgaaggggtgttggattttggcaaaggctttttcggcatctagtgaaatgatcatgtattttttttcctgagtctgtttatatggtggattacattgatggatttttgtatgttgaaccatccttgcatccctgggatgaagcctacttgtttgtgatggatgatttctctgatgtgttcttggatttgatttgccagtattttattgagaattttttcgtcaatgttcatgagggatattggtctgtagtttctggtagaattctgcactgaagccatctggccctgagctttttttggttgggagacttctgatgacttcttcaatttcattaggggttataggtctatttaagttgctaatctgttcttgatttaattttggtaagtcaaatctgtccagaaaattgtccatttcctttagattttcgaattttgaggaatataggttttcgaagtatgacctgatgattctctggatttcctctgtgtctgttgttatgtcccccttttcattcctgattttattaatttgcatgttcactctttgttttttagtaagtttggataaaggtttgtctatcttgttgattttctcgaagaaccaactctttgttatattgatcctttgcattggtctcctagtttcgattttattgatttcagccctcaatttgattatttcctggtgtctgctcctctggggtgtattggcctctttgttttctaaagctttcagttgtgctgttaattctctagtgtgattattctcctgtttctttatgtgggcatttagggctaagaactttcctcttagtactgctttcaaagtatcccataagtttggatatattgtgtccatattctcattgaattctaggaaatctttaatttctttttttatttcttcctggacccatgaattgtgcaattgggtattacataattccatgagtttgtaggttttctctagttcgtgttgttgttgaattctaattttaaagcatagtggtctgataagacacagggattatttcaattttttgtacctgttgaggtttgctatgttttgaagtatgtgatcgattttagagaaggttccatgtggcactgagaagaaggtaaattgttttgtatttggatggaatgttctatagatatctgttaagtccaattgcgccataacttctattagttcttttgtttctttgttaagtttctgtctggtgctcctgtacagtgataagagtggggtgttgaagtctcccactataagtgtgtgcagttttatgtgtgatttgagttttagtaatgtttcttttacaaacgtggatgcctttgtatttggggcgtaaatgttcagaattgagacttcatcctgatggatttctcctgtgatgagtaggaagtgaccttcttcatctcttttgattgattttagtttaaagtccaatttgttggatattaggattcctacccccacttgtttcttgggtccatttgattggaaaatctttccccaacctttaattcttaggtaccatctgtctttgaagttgaggagtgtttcttgtatgcagcagaaggaaggattctgtcttcttatccattctgctaatctgtgtctttttatatgggagttaagaccattaatgttgatggatattaatgaccattgatggttcattcttgtttggtttttgatttggtgatagtggcaagattatgtgtgggattctatccctttttcctttgggctgttggtaaagtggggttatctattgcctatatttttctggttgtagttaacttccttgggttgcaattttccttccagaactttctgtagggttggattggtggatatgtatcatttgaatctggctttgtcatggaatatcttgttttctacatctataatgattgaaagctttgctgggtatagcagtctgggctggcatccatggtctcttagtgtaggtagaatatctatccaggaccttctggctttcagagttttccatggaaaagtcgggtgtgattctgataggtttgcctttataggttacttgacctttttcctttgctgctcttaatattttctctttgttctgtatatttggtgttttgattattatgtggtgaggagacctttttttggtttagtctatttagtgttctgtaggcttcttgtattttcattggcatgtctttctttaggttgggaaagttttctcctatgatttttattgaatacattttctgtgcctttgagttggatttcttcaccttcttttatactcattattcttaggtttggtcttttcacggtatcccgtatttcctggatattttgtgttagggatttgttggacttaagattttctttcattgatgaatctatttctgctagtgtgtcttcaactcctgagattctctcttccatctcttgtattctgttggttatgcttacatctgtagttcctgatcgtgtacccagcttttctatttccagcattccctcagattgtgctttctttattgtctctatttcagtttttaggtcttgaactatttctttgagagatttgttgatatcttgtattttttggcttgttttttcttccatttctttaagagattttctcatgtcctctttgaggtcctctataatttttctgaagatgtttttaaggtcattctcttctggtccatctgcattgtgatattcaggtcttgctggtgtgtggttcctagtctctggtggtgtcatatttggttttctgttgttgaatgtgcttttacattgaactcttctcatcctttcttcttgtgggtatagcaggagtctcttcctctcctggtgggtgtgggaccaagattctcttctggtagatgcaaacagttctaatactctgatgtctgtcctcttgtcgtggatggaggtgacactgttaccaaggtcttggcagtgtccgggtgtgtcggatccccctgccgagctaggatctggcaagcaaacccctggcatcagatgcctccaagcagggtcgctgaaccccattttacaattcttaagtcacatttaaaactcttaaatacataaagagatatctgatcttataatttcactttactgagaaagaactttcattattcgggttattttacttgtaaattgactttattttgaatatacatatttagacataattttgtacaaacgtggagcttttcttttcatttttagttggcttttgaaatgtcttatcttccttcttcatgtatcaaccataactctaagtcaacagcctagtcgacatcctttcatgtattattatgtctgcataattctacttaatcctgtactctatctatgcattattcattatgagggggaagccttctttagttgccgtcttacaggaagggattctaaatacatcctctctctctctctctctctctctctctctctctctctctctctctctctctctctctctctctctctctctgtcttcccccttctcatgggaattcctccagtgcctctgaggtgactctcattcattctttaaatgactgcacagtgttctctgggctgcagatagtacagaatctagtcctacgctagcaatgggacatgttctctttccatcggccactagggagcgctgtcagtgcagtgttagggtgagcagcagccagctggggcgagacttggacacacatgcaagacttaactaccctcttcattctcatcagccttcttcattctcagttgaagaagcagtttgccccaacttctctcccaagccttgctcaagaaggggacccagaactcaccggctttctccaatcaggagtttacatactatccccggaggaatgtgggggggggggaaataggggcatgtattatgacagactcagttttcttgttcggaacccccacagttgttgacagacacggagaaaatgtcttgccaggaatgttctgaacttcacaaccaatgagaacagctcctgtcactattgccactggagtgtcacagctcaggaagacagaaaactccagtgagcaggctgagaacatgacacacattctctcatttgatatttacagaaatcccatgatgcaaatgcaattttgttgttatacaaataaagtgtgtgacgcagatatgacaagtccacacatcaacacggatctcaaaaacatgacatgaatttccctcatgccaccttaaataggtcactgcatgacccctcctgcatctccatcttcaactcctgggacaacctgaagttcaagttcaatccaagttccctatatttttgcaaagtaagcttacacttgttctcacttcctgtcctgagtgccttcttacacttcagggaatcatccagacttcaaccaatgctctgtaagacaaactcctccttcaacaggtcagttcacacatcaccctgtctgtgagactttaatgtggtttacttaagtcctctctggaaaaaaaaaaagttctcaagccaagacttagactcactgacagtgtgcaacctggcacatgtcggaccctcagtgtaagttcataaacaaatgactaactgggagaactgaggggtctctgaaagaaccagtgtcaaactatactcctaatgacataaaatatataaagaaaagccagcaaatttgagttgctcctttcagagaggatttctgtgacaaattcatttaccaaaccaatttagcaaagaaagagcccctggctttgctccatggcagggcctgcagggctatttgtcctgtgggcatgagtactagaaaactgaagagtgtgtgctgggctattcatgcgcagctctgtgctagctgctgctgggagagaaggttcagttctttattaagagtgaaaatacacagagatctagccttacatagcagccattaaggagataaaaaagcaggaaaagtcccctttcatcagaaacgtttgtggtaatcatggacattgtgcttctcttaagaaacataaacagaggttggctttctttggtcatgcttatcattttccttcctttccagagagtgtatctatcctcctgggaaaagaaatgaagacctggtggcgtggaagctgccagggccacaattgctaatgttctttctcatgtgctattttctttctgtgaactctgagacaccactaatgagaatgtccgattattacatctgttgaccaagagcaggctttgctgcccaataacacagccttctctggcaattcactctaatgagaagctgggtaatcatgggacatttagtcaaggaatatagttggggacttagagcctatgttgaacctacagtcagaaaggaagatgttttgatgtttcaggtataatcagatttattttatatatgaagaaatacctgtagagaatattttttatttttattccccaaattctgaatatattttgtatatcaaagaagcatagatctagatgggggctctaaatatcatctacttcaaggcaggaataactatattccactcatccacaaaagtcaaccagccaccctgttggatgtttctgagatatttcatcccactagcccttgagcctcagaaactattgtcttcattccctctatgggcaaagaaaagtttagcttttccattgtattcatcttctctacagtggaaggaggggctgagatggtttccactgcattcatcctctctctagtggtaggatgagcttaactggcttccattacattcatcttctctacaatggaagaaggagcttaactggtttccattgtctccagagtctggatgggcttttttcaagattctgttttgtttttcaattatatatacacgtgtgtgcatgtgagtgctggtttttaattgcatataccatgcagtctgtgtcattttgtctgccttgatgtcctgtcctttcccacattaaccctcagaaccaagcagtcacactagtattacattttgtatacatgcatacacatcccatgtagcgtcttaggcctggcctacaagacttgactctgctgtctcacttttgggattcagagagtccaggcgattcttaggaggaccgagttagtaaagtatctcatcaaatggttactccagtttgagatccttaaaattagtcactaaccacacaataagaaaaaacaattagccccttcccaaaaacccaaggatccaaagtcagtggggaaggagtcctagggagatagagaagcagacagcaaccctggggaaatttcattatgcaaagatcccaagtctctgagggccaccaagtctctgagcaccaccagtgggctgtttgaattgagatccatttgtcaatggtcgctttgggaagtggggataggggttcggggatgcttctgtaaagctatgacttacataaggaggcaccaaacatgtgtcaaggcatggaaaacaagtagaagaagggagggtggacactttttagaaatctttaaaaacaggaaaaagctaaaaaatggagacacatattctttctcagctctttatcttagtggcttttcgattgctaatactacaccatcacatagactgtaagttataaagaaaggaggttcatttgggatcacaatcatgacctaaagtggaggggctgcagctgacaatggctttttttgctggcagagttctagattggcagaggaaatcatgtgttgggagacagaaaatgtacaagagatctagtcaaactggcttttctagcaaactgttcttaaaataacccattcacccattaactaattgcactgttgtctgttcactcatatacaaggacagaaccttaatcagttgatcatggtcccctctgttactgcttcacaacagagattaaacttaaggaagaattacaaaagagacaaaccatacttaaaccagtgctcttcttaaggaggggcagggagggagaaggaagaaggaaagataaattaatgctaaagatactcagaaaaaaagacacagggaaacattatgtctacttaaaactacattatatgtaagtatatatgtatacatacatatacatatatacatatatgtatatacatatataatatatatgtattaatgaatttggggtgataatgctaaccctgagagccatagaataacaaaatccccaaagatggtcatgggtaacctacctttgagttgtattccaagggagtcaaagagactcccaaaacaacataggatattgctcttgtccttggcggcccccagaacttgaagtaagatcctattggtgatggcactatacactttggaaagaggactccatctggagctaatctggaagcctcatctctgagtatcagaggatatgatgcaaactgccaagggagaaaagcaatcagtagtcctggcctactatggactacagcaatgactagcatggcaagaatctgccaagggttcaatatcaaggtatcatgccagagtggcaccttggagactaattggtcttcaggtccaatcaataggagggaattcatgcctgttactgtaaggccagcccaccgcccagggctagtgaagccaaagcacctagagaacctactactgccacgttcttaaaccagtataaattctaactaccatctaaatatttatccatctacccacaaacaaatgcagtttcaacccctcattaaagaagtttccttccaacagagagaccattgcagaagccacaactggtcaaaattcagagaacagctgactgaggggtacctgtcaccagctgagccatctacaacaccacccctacatgtaagacttggggaacatgaagaacgaagaagaacataaagattttaagaatcagaggaccatgacctctgctgtgagacagtatcttctatatatgacaacgaagctgtgcccatgaaatctcaacaacgtgcttgcctaaacaagatccaaagaatgacaacagcagttgacttgccactgtagataggggaatcgtcacatggccccatccgtagatgaagagctacaggcaattaatggctactgggaaaaagacaatcagacttctcggggggggggggggagcccctgatagattatccaaccctaagcaatcaattgtaaacacacatacataccaacaacaccaaatggactgagcatgatatatttatatatgtggacatgtacgtggcaataattaaaattgaagagatcatgaatctgagagggagttggggggaaggaggggtggaaatggcataaatacaatactcatgtgtgaaattttcaaaaagataaattaaaaataagataaatataataacacaatagaacatacagcttcttgcataattacaaactagagcccaggtccagacaataacaagcaacatagttattaagaatgttcagtgctaaagaaagactcacctggacacgggagctttagtgtcctcacctataacatgggatggcaatatgataggtctagggtggggataggttaccatcttaaaagcaagtagcggactcatccctgcaaagtgtctgatgttacaaaaatgggagagtggtccttgctgggtgctacctagcaactgcagtacctatagacgttatagaagagggaacccatgtacttccagctgttgcttgccttgccctgtaaaatgtattcagatccataaattcattttttaaaaaagactggggtgaaaaaaaagactggggtgagtatgatccagatatttgtgtatataactgtcaaagaataaataaaacatattcttttacaaatagttttttcttgagtacaaatttctcccatacactattacttttgccactctgcaatttaaatgagaggtttgaagtggttaaaaggcacatgcagtcctatataaaacagtttttatattgatcttcatgaaacaataatcctaaaactgggattcttgtgattttgaaagagtattttcatattgtaactttcagttaaaataagaaacacaaagatttataaaggaaattggaattcaggaaactcagaaacaatgacaacttttaatgtaatattaaataaatatctgagattttctttcagtaaaacttaaaagaaagaaagtcgaagcagcaaccacagctcctctgtgctatagacaggcttctgcatatggaactagaagaaaacctgttctccaaaatgagggacagtatttaaaaaccataagcaacaaaaagaactctgcagacacatagacagagacagtgtcttagcctacatctccctcctaaacattaaggaaaatgaacttcatataaaaatgagtatcaaaaaagggaggctagagattgaaatctagataatgtttttttcaagaaaataaagaatagggcacaagaaatgcccataaataatgagaaaaaacatacccagagtaatggcccatagcacataaaatcataaccagttcttaataacgctattattgctgtagatatgcacggacacatgcatttcacagggatgtgagaaagtcagaggacaactttgaagagtcacttccttaaaagtggcctctgggaattgggctcaggtcactgaggttgtgcagcaagtgctgggccatcacgccacctgaaacctgatattttaaagtaatggaaactttacacagttaattatatgaaagaatgagatagatcagaattaggaagaacttgggtatgagataaactaaagtcaaaattaaaaaaaaaaaaatcaaacaagacttactttccagaagaaggtatttacatgctcaaaaaaatgtatgtagcacgagttctgattggtcttaataataaaaacttggaggcagctattggggtaaatgctgaaaggtcggcgaaataaaggagtcagccacaagagagacctcttacctctactgaatcctcagaacaaaggggccatcctgtccccacaaatcctcaggctgaacgcaatgagttcctctctcctcccaccttatatttctctctctgcccagccatatcacttctgtctccacttccctagtgctgggattaaaggcgtgtgactcccaagcactgggattaaaggtgtgtgccatcactgcctagcatctatggctaatgagcatggctagctccatactctgatcttcaggcaagctttatttgatagatcacaaaatatcaccacatttcccctttttttgtctataataaaaaaggttaaaactaatataagaaaaagtatatacaatgagtacaataactacatacaataaatgaagacagatgttcaatgtcaataatcatcagaaaggcaaaacaaatatgttggagggtgggtattcatctgcaatccaagaatttgacccctaaaagtttcctagagaaatatcacaaaggtttatattcaagtgttttcatcatagctttaaatcataatggcccaaatctagaaacaacacaaatgtccatagaaagaagaaaacaaaccaaccagcaggaattctcctaaagatccatgccctagacacaagtcaaggaccaatcctgccagcatgtcttcctagagacagcagtcccgacagctatattcagtctttcttactctataataaaacttcaccaagctatgcactagactgtcccccaccccatctttggaaccttatgtgtaggctatataccaattctaaaaattttaaactgttataaattactgattcttaggtcctattttatgaccaggttgcaataggtagatggtcaagaaatgcattttgacattgaaagcctacaagcaaagtaaattcaatgggctctcatttcccaacttgtgcagaacacagccagccatctaatgacttgatcctgccctgtggcagtgttgcataataaagaaaacaagggatttggcctcaggccaaattgattttcaaatggccatcaatcatttgatagttagatcgtaacaggtacactccatgttcttccagtccggaattaaggcagatgccattttttccacctggcaaaaagcaatgtggaacaaggatgtgactccctaagacagaatggtgacttctatggaaacatgagcaaacatacaagctttcttttgtttgttgtactaagtcagacccaaccccgccccatctcccccattccacccacctccccaacacacacggcttccatttttcagtgcaccaatagatcttccttgagtacatagtgtctgtcaggccgtgtgcagtaccctaaatgtgaaataagaactctacctttgcacgctggtcagagagactttgtgtgacgtgtgtggactgcaggagagaacactagcctttgtagggggaaagatgaacacagggtttcgggattgcccaggcaggactcactctcagtctgcagtgccaggatcctatgatgtgtaccgctgcccactgtagaactaaagggtgctagctactattcacaactggccaaatgaaaaacctctaggttctagactaggtcagagtgccctctactgaaacaggaagccagagatagatgggggtggaggagtctgagcaaaaaaaaaaaagaacactctctatgaaactttactttttggttttgttgttgtttgtaggtttttgttgcttcattttttagtagacatcagtaaaaatcctcctttttaaagcccaccaaaaaccgtcactagatacttatttaaatggaaagcaatagaggaccatcagacaaatgtgaatatcacaatggcaaagcaggtttagaataactagcatatgaaagcttcccagacatgttggtagattatcaaaacctaaagtgtgtcagcatggagcctgtgacatgagaccacacagtctgccctctgggagaccacccttccctctgggaagctagcttccattttcactattcaaagataagaaattcagccttaaaaatattaaggaagctaaaaatacatgtcaccgagtgatacacagctgaaaagactatgcacacagatgtccaattctatgatgttctggaaaaggtaaacccaggggctaaaagggacagagagataagcaagcagagcacagaggctatttaaggcagtgaactaactttagaatactgcaaggatggctatgtcttgttttgcatttgttaaaatatataaaggcaaagtagagcctaaggaaaagtacatacaggctttgggcaatcataatgcatcagtgtaggtctgccctggggcaggatgttgaagaggagtctggaggttctgtgattggggatttggaacatgtatagattctaaaccttatgctcagttttcctatacactttaactcatctgaataaaaagtctacttttcattttgtttaaatcaagctatcataaaccaggcctcaaaaggcaaagttttataaaaacacagtttgtcatgacatctaaagagacatggatgtaaacatgtacatgtatatgtatttgtgcatgtgcacatgtgtgtgtttatatgtgcttgtgtgtatatatgcatgtgtgtgcatgcatgcacatgtgtatatgtgaatgtgtatttgtgaatgtgtgtgtgcacatgtttatgtttgtatatataaatatatgtgtgtatgtgcatgtatgtacacatgtgggtgcatgttcttattcatatttgtgtgtatgagtgtgtgtgtgtgtagttccatgacaggaggaacttggatgaaagtcattttatttcctttttcttgcctaatctctgtccaagcaacaatctatggagacagtgatgactgttatttgtagtcgcaactggtagttgtgatttcaaggaagtggaagcacacactcaaaacagcaatggtcttaaggtctttttcttgttcatttttgtttgttgagacagtggctcatcatgtaggcctggctggtctggaacttgtgatcatcctcttgcctctgtctgtcctccggtgctgggatgacagctatgacacttatttttagcatagttcctgaactggagagctcacactccattcaggctcaagtatgccacaaaagaggcaatttgcttaagtgaagtatccatcccccacagtgtgtgttctacctgctggtggacaatgttcaggggacagggacacgtcagcgtttggagagggagaggagaaaagagttgcacagaaattggaccacccttcacaaaaaagttttaggaacactggcaggccaacaggcaccatgacaatgtgagagtctgaaggaaggggcttcagatctattctaagaggtttctaggagaaggggagttcctatattgcaaggaagcaggcttagttattctgtgtcctatgctatgagatagaagtggggtactcgtgacctagactataggaatcactctttgttggatgggggcagagctcagctaatgtgcaaccttaatatgtgatccaactcctaggtggcaagaaggctaggtatgtctgccctgctcatagcaatctatgattggaacccaaagggcatggatgttctagcagcactcagtcttcatgtgctgtgtataacagaaaagaaaaggcagtcctttggtttacatgggcaaaggctttgcaagtaagcagcacttaagcaaaagaaaatcatggtagaatgggagttactttgtttataaaggagaacaccatgcaaaatgccagtgtttgtccttgggattgggctatgtggtcttaaacctttgctccactttgaattagcttcaaaagatggatcccagattttcaaacaatatagttaataaatctccaaaaactgtcccaagaggcacactagagtcatttacttaactggctctgaaaataaagtaattaagaatcttacattcttcctagcccctttaattagggagtgaggcctaaatatttcatcatctctacatgattagcatgccaatatagatgaaagggatgagggaggcctctagggaacaggtgcagggtattttacatgcataacaaacatccccagccacatgagtctggacatctggtagagattttgtagtaatgaacatctggaacttaatttcctacatgtagtagaaactgcttctctaagaacatctctactttactcaaagcaatttgcagtcttataatctgttcacaccctccacccagccctcttggaaaataatttccacaatgcctcttgcaacaacccttagactgtctcggttttacaaaataacaagtggatgcatattgtgcagaactgttcccattactgcctttatcccgttgattagctctagctttataattcaagtgacctcagatgactgtccggcttcatcagttaatgctgtcacctggccatggcctgtggatccaacagtatatgtgaaggcatggcaggaagtggggaggtaccaggcagggagttcacttgtgttctgtgcacagtgttcctttcctgtgcacatgggctttcgcgatgactctttccacagttcctgtgattgcttgcaccgtgggcaaatagctgctatcaataaacaccctaacctttcatttgtgagaccagcctgtacttcctgaagataacagtggtttcgatttcaggacaatagaaaacatatcccaagacctttcttggacagtcagaatatttaaagaaaatgaaacaggcagactttagataacactccctttcctttttctccctccttccatccttaaatacagggttaaggggcagctattagataatatctactgtctttagtctaggatgtggctgtgattgctctgtgagtggcggggtgcccacaggatgaagctgacatttagccctgggtttgcctttcactcttttctaggcatagccttggagtgtcgtgtgtaatagcaagccttgagtatttacttctcagaatgatttcccctcccttgaaacacccaaaaaggaagtgtcgacagcaaaaactcccatcagcacttcctaccatgggcagggtacatctcaacaatggaaactcagttaggacctttactctcatcttatgttcctttttttcatctatttctcttcattacaaatttctcctttggcttttataccttggatttagcctttgaaagcactagttatttgtccaataattgaaacgtgtatttattgccatgaaaaatgtgtgtgtgtgtgtgtgtgtgtgtgtgtgtgtgtataattttgtattaggaccttttgaaatgtaaaagttacatatgggaagcatacagtatggaaatgatttaagggggttgctctcagtcaaaaccacatgattttctgctaatcattggccttcggacaagtgaaacctaaagctgagggagtaaaagaggatgtggagtagtcagcatggatatacactttttaacaaaggaagcttgacacagtgaaaactttggacacaacaaaggaaggaaatctgagtgtccgtaacttgccacttaccatgacagtgtctcatccacgcctgatgagggtgtctctgcttgtatcaggccatttcctttgataatacattcctatctcacacaccatgcctgggaaatagcaggatcctttacccccaccaggcaggcccgagctgaagacgtcatcagaaccccccatgtttccgttgttagtcacggtgctgactgcaggcattgcatctttctctatttacttcctgcccatttaagagaaatcagtaatgtcctgagttttggtttcaagatgaattaacaagctcagcaaaaagatgagactgagaggggagtatttcatagctcattgcttagaatcagaactgttgaagcctatagagttcaccttcccactgaaagaagaagacggcggcatatgggatgatttataattttagacaatcaaattgagtcctgcaagaaagtgaactgaaaagagaagtgacatagaaagattgaagtaggaagtctatttaggagatgactatggatccaggcaagaaacaacagtatcttgaattagaggataaacaataaggatgcagacaaatagcaaacaggtcacgtattatgagagtgagtacatttgctgataaattagtcaggaggaatgaaatgggaaaacaacagagacaacaacctccagtgtgtctttagtttgccattggttggttttgttccattcgaacaatggagttaaagttagcacagcttactaagagggaataggatgggagatcgggcaagttgagtttgaatgtcacactggagctatctcttcaaaagtcagcaaaccagagtatctgtgtttaagccagagttcagtgaagagattcaaaagtagtaaacatgcagatgaaatgaatgccaagagaatgaatggaatcacctagaacagctaagggaccttgtggtcctcaatggtccaggcacctgaaaagcttgaagaaaaatgcatgagcaattcccacttcacacacaaaccagcaaatgcaggaggagtgggaacagtcctccaaaccatcagagacatggacctgggtctttgatatgctgaagccgaggccaagaagaggagaatccaggaagggagctaaaggcagaggtaggagaacaggaaaggcatgcttgatgtcctggaagctcagacagtgtcttctgatggatggacaggccacttagttgctgcattattaagacaaatgagaaccaagaattgtcaccatggccggcaaagataagcaagctgccatctgtttgctttgaaatatgaagggaaatgatcagctgagtgagcataagaacagggatgctaaggttagagagaaaagtgaaaatgttatctttaggaaccagagagaacctccgtaacagagaaaatagataaactgagaaatatcagtattcttctgataactgtgaacatcactttaaagtggggctattatatcaatttgtattgattaatctggccctattcagacactctgagcaaggaggcagttgagcttaatcatagtggtggttttgtttagggggctatttttctagtcatcatatttgtttggtcaagcatgatgtgagaaggaggtggtagagctaatagctttagcctcctcatttgccagaagataccacaggaagaagccttcagaatggagaagctctcactgggctcttccacacactgccctgacagaaagatcattcttccgggaggcataatagataaatagttaataaagaagtagtacatattaatcatattttcaagatgagtttttactttaacgagtctagtaaattctcctagcagcaagtaaggtagtgcccacatactggggacccaaccaaacacaggggtcagtagggtgagtgaccctgaggcccaccatcctaagaactttcagccctcctatttttcctgtgttcactgtgactgtcgccagtggttcctctgtgtaaataatttgattttcagctgtgcatgctttgctttttgttctttctgatttatgtttccaattaggttttataatgacgttgttttgtttaacttgttccctctgctctgagagctcctttttcattttgttctgctgtttgttggggggggggagtttttgcatcatctctttgaattcttattttatacgttttatttattatgctaaataaggaattctcattcacaattcatttatggccaaaggatccatggcaataagaaccaaactagtcacttcttttcctgccacaacccactctgtcctccctctttcttcactctggtctctgtttctctctttgatgcctcttcctctttcccttacttcacccaacttctcccttcttccagcctttcttctccctcccttctccaaccttcactcctcccctccattccatcctttcttccttctccctccttgttctctgttgatctggcactatgattcttttttacatatgcttgagacagaaaattttgagcagaaattctccttgagtgggtaggatgcaagccagttgggtcttgttgaaacttccactcactgaaactgcgcaatttcgagtcacaatgatttaaaagccagctggaaactactgggtattttacaatgggctctttcttatgagccagccaaaggcagcagaggccatactcttcacctgggattgttaatgctgttcctctggaactcaaactccacttctcaattccagaggcttgttaggtgatcaagcctttcttagtttccatctttataaacagatcagtaatctgtaataacacaaattgatgataacaaaattaaaataatatttagttcaaaaaatcttctaaattcatcaggaacatctattttgaggcactccaaaaaagtgaagaaaatgtctatactttcatcatgatgacattttctttctctccctctctcttttacacacacacacacacacacacacacacacacacacacacacacacacacacacgctagcagagagttccatttcttgctttagctccattccttggggcattctgatcagttattctggctcctggccctgccacttcctcattatgcagaggaagtacattcttagcgcttacacccacaaaccacacaggaaatgaaaggtgggattaagtaaaaaccctccacagcctttggtctactattgcatctgcccttgccattcctattccccagaggctcctgatagagaaacccacaagagccaccaggaagctcacatggaaatgcaccttggctgtgactgcagctgtgtctgagctggtgtggtgctatggagttcacgccctgcccatgcatggtcagcaaagccaaactcagcattggaagagaatcctcttcattgacagagagagcactcggcatcctgagagaagcctgttcattgatggagggagcactcggcttctacccaccagatatgatagcaaagctgccagatatactgtctacatcctccaccatgccatataaagaccgagatggtgcttatgaaatactccatatatgtcaaaagtgttagctgggctactcaccattaagcatacttgcctaaagggtttctttccagattttgagattcttgacctttgatttgactttattgaaatacgtttccttcaggaagtcccaaacttagtatttagctattgtttgtttgtttatccaaaagtgcttttgtgatgctttatgtcaccttgcttgataggaatgcttttttttcttcatcctttcactttagctgtccatttagacattcacaaaaagtctttccagaagattcatttgttcagcagacattgagtatttgttgagaaatgcgtcgtcttcctcttacttcccttctctttattttacaacacagactgaagagaaaccagtccggattgcagctatcagcacagttcttagggaagtctcagtgcatgaattcactcacatgtgtacactaagtgcatgctgtatgcctggcaacaagccctcctccaggagctgaaaacaaaagtatagtccctggctaatggacctcagggactactaacaactaacaaatgtaaggtgtgctaaatgctagatctagtaatttatatgatgctatgggagcctctgggtcagagaaagctacattaagataaaacaaagaagctgtttaaaagtaacagctgagtactatctttccaggacagaaaaggtacaaaacgtaaaacaacaacaataccaacaaaaccctagacactgggtcaaaacccaagagaacatgatctacttggaactatcgaggtttaggtttcatttaatagaaactggaaagaaggtggaaaggttgcaaagaggccatgtgtcaattagtttatattacaccctggtgtccatgaagaaagacatcaggtgattttagttgaaagagtgggggtaccaggcgtgtgctgtaagaagtcactgtagtggcagcatgtaaaagactgtagggggaacaagcctgagtgtggagagaacattggatggtgacagctgaaatcaaacaagatggtccaaattaagaatgtagcagcgggaattcaagtgagttgatgtctctaagagatgtggagtagcaaaaacaatgactttcagtgagcaaatggttaccaatgacagggaaaagagtccctgacaactctccagtgcttggcctgagcatctgggtagactggtagtattcaatgagaggatgaacaggagagagaatagattttataaaagatgttatgatggtttgaatgagaaatgttccctatgggctcaagcatttgaacaatggtccccagtcggtggtactgactggagaggttatgggggtagtacacccttgttcgaggatggagctcactgaggatgggctttgagagtttaaaagcttgacccacattcagttccttttctgttttgtgctttcggattgtgatgtggtctctcagtttcctgttcctgcttccatgcctcccagccatgaaggactcttacactctgcaactataagccaacataaagccttccttctataagttgccttggtcatagtattttatcacagcaacagaagaaagtaactaataccaatgtttatccattttagatgtctcaagtcaaattgcttctgcaatgtctagacacaagtgttcaagggtggtacaagaatctcagctaggagtcccatagccaactaagcagggcacgggggagtcaacaccacaaacatatgaagggagagaaagaaggggaagtgaggggagaagagaagaggagttaaggggggaagatcacagtaaactgatgttttcacctaaaacagtaaatattctatgaagcctgatattttgatattgcaattccaggagaaatcactctagccaatttacttaaccttacagcttcttcggagagtatatcatagatgctggagttgtgtgcatctttacttaactccgagtaacttgccttgctcatgccaagaaagcctgatgagatggagccttttcagactcttctgtaccgtttctgcatctctaagcactgtcttgtcttctcttatcttgtgctaaatgtgttcttgtgctgtgtctttacctcagtggcacttcactgaaagttaccacacatctgcagcaggttgaaaacagtagaagaaaatcacacaaaagcaaatgttgaccttaacaaatattcattatttcatattgaaagcacaactttagtgactttcaaacatcatgcattgcttggaaatacttagtctgagggctggcaaatgaggatctgtgtagaatatttgccttgcacgtgttagggtccagtccaacctccagcactacaaaaactaaagtcatatatatttgtatcgttcagtgtgtatttaatacttatgaaaactggatatcatgggttcaaaaagaacccaccacaatttttccattaacatgtaaatatttcctttatttaaaagagccttctcttaacaacataattgaatggaagctattataagagggacagatacaataaaaattggagggtgaggagcataaaatgtggcttcctttaagatggaagattatttcatgtaattgtgtgtgtgagagtgagagagagagagagagagagagagagagagagagagagagagagatagagaatgaagacacagaagtcagagtgcattcctgacaaggattttctgggaaagataaaaaaggagaatgaggaacacagattgctggattaagtttactgaaggccattgttttatagaaaatgagagaatggtgagaatccaacagattccagttggtgggttgagagaaagaaggtacaagttctaagcttacagataaatttggctactatttagttatttatcaaacaccagcctcaatgatttcaaggaattattttattttacatctagcaaacactaagttgatgtgggatgtcattctgtacactgtgaatatgtgttgcttttattggttgatgaataaagctgctttggcctatggcaaggcaggatagagccaggagggaaatccaagcagacatacaggagaaaaagggcagggttgggagacaccatccagccacccaaggaataagatgccaacagacttataatgccatggccacgtggcaatacttagattaataaaaatgaattaatttaatatgtgagagctagctagtaataagcctgaaccatcagccaaacattcataattaatattaaaccccgggaactagagggcacaaataaattccagctactctaagtcaactgtgaataagtcagattatcattttttataggtaggcttccttcaactaggttaagtctttcagactaagttttccaaagatggaatcatctccctccacaccttcaggcattacaacatgcattctcataggaatgtctacaatgctagcctgccctgcaaaactctaacactagcatggagagaggttggggaggggaatgttaggtctgtttctctggagtggttgcattaggtttggaaaggaatacttctttatgacactcagaatagcatcagctgacagtttttggtgctgctcagggaacatctgaagattgatcatggcttatgggatcatcaaaggcaatcaagaaatcactagaagtgttcagacatttctggagcagtagaaatatgccactggctcactgctatcacagcagaacactgtgacatccttgtgataaagaattggtgatatatatatatatatatacatatatatgtgtgtgtgtgtgtgtgtgtgcatgtgagagagagagtatgtgtatacatatatacatatatgtatatatcatatataatattcctcatatataatatatatataagaaaaatatggttttacagatttatttgtgcatcttctataacccagtaaggatatgatgactttttgaaaatctaagcatccatacatctaagtaccagcactttatgcaacaaatgccatttgcaccctatctctatcagatcatgtgttgtcagaagtgtgtcagataccatcaatgacccttcctttctatcatcatcaggattattgtcatttgtatttcataatatatcatcaagatatattatgcattatagacatttatagtcccctgacagttcagtttatggtaaaagagtgatgtttggaatatctttaggatgatcttcattgatttcattgtttaaataagtgccatcttatttatttcacatagtctgtaatttgtattaaactctaatttttactattttactatgttatcatatatacctgtaacattagtattttcattatagtttttagattaataatagaatcactcctaatttcagtaatagaatcactgattttctaaagttatacatttctaatttcaatgagcagtttttatcttctggttgaaacaagaacagaatggccacctgttgttgttgtttttcctctttggctctttgaggagcctgccatctagctcccaagtaaatcacacagaatcttattatttcttatgaatgcctggccttagcttggcttgttgcttgtcagcttttcttaatttaaattattccatctatctcttgcctctgggcctttctcattttctgtatatcttttcttcacttctgctctgtggctgggtggctggccccttttttgtcactccatctctttgctctttttctccttctattcattctctctgcctgcaagccctgcctaccagccctgcctaccctttcttcttccttgccattggccattcagctctttattagaccaatcaggtgtcatagacaggcaagtaacacagtttcacacagttaaacaaatgcaacataaaagaatgcaacacatttttgcatcttaaacaaatgttccacagcataaacaaatgtaacacatcttaaaataatattctacaacagctaccattgttgatttctccaggtcaaagtcacacacacacacaattattacaagtaatttaaggagggtttcctcttattaagtatcattttaagtaaacaaatcatgttaagaatcttaagacaggtggtttatagttttaattataattttaactaaagctgattagatgtgtttggagtaggtggtagtattcaggcatctgtactagcctgcccttggggttctgacaggacacacactcagctgcagtcactaagagcaatacctgtacatattcactatgttcccttttaaaagggccctgactacctcccatccctctctctctctctctcctctctctctctctctctctctctctctctctctctctctctcttctgtgtgtgtgtgtgtgtgtgtgtgtgtgtgtgtgtgtgtgtgtgtggtgtgtgtgtctttctctctgttctctcactctctcccattctctgtcctcctctttcctctctcctgctgctcctgtctccagaggccagtctctcctttccctctcccctttttatgatctctttccctaattaaaaaaaaaaaaaacccttctgcttgaaccctgtcacttggtgtctttctgtagtgggtcacttttcttaaattacaacagtagggcctataaaaattgttcagttaagtgaaggcaaacaaccccaagcctgattcccttatttctatcccagggactcacatggtggagggagaaaaggaaaagtgacttccttcaacaaacacacatatgcatgcaccttaaataattatgattttctaattttgcaaaataaagtatgtggagtgaattatatgacatagaatattaaagaatttatatgtggactctctagtcgcatagaactttacattttgatttatagtattctgagtgaaagtcctggattgaatccactgtttggttgtagggttagctcattgcagttcttcctaatcataagaaatgctgcaaacatttgcagacacacttgagtgtacaagtttctgtagcttcctcataagtgggtttgagattctgggtaaaaagaatggttgtctttacttcaatgtgatacatccccccatctttactagagatggttgaatattccaagaaggagtgccaacagcctaatcctagtgcttctatgagagatgcctgtctcatctcatcacacccccatctccacaagctttcccttgcctccagtacaatttatatacacatattctttttctctttggcttggaagatagatgcagcctttgtacatttttattaaaaaatattttatgtctacgtgttaatctgaatgtatgaatgtatactggatatgggtctggtacctacagagatcagtaaaagcatcagagcccctcaaactgaacttacagagaattatgagtcaccatttgggtgctgtaaattgaacttagatcctgtggaaaaacaggcagtgcttttagcttctgagccaactctccatcccctggagttttattctttaatgttcacttttaggtctctaatctcatgattagctgtattgtctttctaacagagaaatcaggttggacccctgaatgtagactgcagagaagcagtgctgtcccccatgggaactgtcaaatgctcccagggagatgtacatgttctcagtgactctgaaacatgttagaccttgagcagcattactgtagaattactcagtgtctacctacctatacaaagccctctttcctagccaatgagcagaccacccacaccacttcactgtctttgacatacccagctagaatgttttcttgtgtattaggggaaggggcagggaaagtgtcaatggtgaattaagcataacagcctttaggaaccattagtctcttgttttagttgttttgcttcccaacccttggttatctgttaatggttctctcattaaaagaagtgatttttgcttatgttcctttgaaccagtcttcctatggttctgatgtttgcatcattgttatctgagttcagagctcagtgtttgcagtgactttctgtcagcagcttaaagagatgactttgctgtgctctggcatctggggcagatatgaagtctgttgtttgtctaatgagtgcttgttaactggaattctgtcttcctctatgtggctttgagaattgttccctttgtgtgagaattgttccttttgtgtgagggtagcatctcctctatatgtacatttctttctgccttaacttgtgtactctgttaatgtatggatttataaatttcttcaactctgaaaagtcttggctgctatttttggtgaacattgctttcatctcttttgttctctttcttttgaacatcctgatgaatgcatcctgggggtttgcacctcgtcttctctactttctacttccccgtgtttcctccttctaccttttgcctcttctgttgcttcttctccatttttgctgaattatagcttaatagttccaagcactcattttgtctttggctctgagttggtccagagcagcttaagataagagggggccaatttctatgtgtgaggtataaaacacagaacaagaagaatctagagacaatatattggtactctgggtgaggtttgggggagccacaggtgtgggatgagaattttatggcttcattagcctttatactatgtttgggagatgtgcccttaatctccagaggaagggacaatgatttgggctccttgaaaagaaagagaaggattgaggaatgtatatagagatgaggaacctgaatttattcccattcttactttaggcttataaagtcttgtatataattctatagatcgttggctgtttcctcaccaaagggataaggagtctggcctcatcgattataaagaagtcagcaacaagttactctatcctttacaaacttataaacaaatctatagagccatcttaaaggcatgaagagaattgcccaccaaaggacaaaaaaaatgaaacaacaacaaagaaataccttgtcactgaaattcaccaggttacaaaagaattgtgcacatacttgtggcccagatcctataagcatccctgaggaatgtatgttacatggggaggattggattgggttttgttttgtttgctgtggttgttttgtttgtttgtttatttcatcttttccagtctttgaacaagatgacctgtatagcccacaccagggaccaccatgtttgtatctttctcttctcagccaggttccaaagatggtgtacaaatgccagtggactagaagtcaagatgcatcaggagcacttaagaaataaggaaagggaagacagagagagcaagataaagtcctgagtggatgtgtattattgacattggcacagccatgtcaaggaacccactgccttagacttgtgggaatagcaaagacttctccaggtcagtctcaaaagaaaggcaaagccttcatctggtccaagtatggatgttattaatggttgacccttagcttaaaccagtgtatacagaacggtcaatcacagctccctcctcatccatgactacaatctgaaaatgtccaccaacagagacctcctactcagattaggtaacccatctctttcttattaagctatatatacacttatatatacattcatacatacacacacacacacacacacacacacacacacacacacacacacaatcctatctccttgttcaccagtatatagcagataaattgagattgggggctgtaatgggaataaatctttattaccccttgaacagatgcacatggatttctcatcacagggggctgctggtgcatctccatcagagcaaacagctcactcaatcctagcttttctgtgcatttatctctgtgtctgtgatttcttcattctttcattgacccagtaatgtcaagtctaaagccatgcaggtcgcagactatatggtgctagaaattaaacccaaacaaaaccctcaagcaccaagtttcctccctggctctcaaagaacaaatttataatgcttccacacacaggtacaatctagcaagaatctttgatttgttctcaaagaccctgaggtataaagaatggtgttgatttatagtttctagttacatgtatgagatgggctgttattatcccattctaataagcaaaagactaagcaaagtgaaaatgaacaaatcctcttaaatgagatcacagagtgaatggcgccctctgaaatggaagatccagatggcggattacagagaataacactttacaagaaggtaaagctgtgagcagcagcctccgatgaaaagggtaggaaaccctgagatgcagctggcaggcagttttgatgtggatatgtctgggagttaaaattcctatggggacccatccatgctgccatgtggatgcgcttttgtgagtttttcttccaggaacaatttccctgcaaaggagctattttgaaacatgccggaatattctgtttctgctcaagtattgcctataagacagatgatttggactggggatatgactcaacaggtaaatggcatgccacacagtgtgaaggcacaagttctaatctccagagtcaacagagaagcaaagtttaagactttcacgaatcttcacatttttaaaatacacaaacaaaaatgaaaaggattgtaagaaatgaacaggatatggtaacattgtagaacctcacacaaagggaacaattctcaaagccacatagaggaagacagaattccggttaacaagcactcattagacaaacaacagacttcatatctgccccagatgccagagcacagcaaagtcatctctttaagctgctgacagaaagtcactgcaaacactgagctctgaactcagataacaatgatgcaaacatcagaaccataggaagactggttcaaaggaatataagcaaaaaaacatttcttttaatgagagaaccattaacagataaccaagggttgggaagcaaaacaacaaaaacaagagactaatggttcctaaaggctgttatgcttaattcaccattgacactttccctgccccttcccctaatacacaagaaaacattctagctgggtatgtcaaagacggtggagtggtgtgggtggtctgctcattggctaggaaagagggctttgtatagataggtagacaatgagtaattctacaggaatgctgctcaagctctagcatgcttcagagtcactgagaacacataggtatgaccattgactagtatgtaaaggtctttcacaaaaaaataaaatttatatcatgcaaggacagatgggtaatgtgaacagagagccaggaagtctgagaaccaaaggaaaataccagaagttaagaactctgtagtagcagaaacaaataattcttttgctggacatagtctgggttttcgggacatgtcaagagaactttttgatgagcaaagagaaaagagactgaaataggtgtggtagaatagccaaggattgagcgagaactccaaaaggtaagacacataatgagactaaaagaagaatttctatattcgttatctttcttgctactgtaagcaaatgcctcacagaaatagcttataggagatgtttatttagcccacagttttagagggattccagtcaaccatagcaaggaactcaaagcagcagcagcaacagcagttctgttcatagtagcaggcacatgaggccatggctgcccatatagcacaaagaaccagaatagcagaccagaacctcaagcacacaaaacctaccaaggccctcccctaatgacctagttttaacaactagacctagcatcccaaaacagcaccactagcaggggaccaagtattcaaacacatgagcctatggggggggaggggcattacagactcaaaacataacaaatacatagtaaccctggaagattaactagaatacagtcgtttcctgagcaatctcttcatgattcaccccagacattgtcctcaaagtctcgccttttataagcaataatgacatcctatgtattatcactgggaagaactttgaatgaactttaaggaactatgagagaactcacagagcatatgcatggttgattgaggtcagcacctgacacataatttccccatgttccatgtgaggtcctcaggatccatcacattataatacatttggcttttaatgttttggaaacagtataaaaactgaattcagttaagcaacatttctctttttttttttcctttttttatttaaattagaaacaagcttcatttacatgtcaatcccagttgcctctcactcccctcctcccctgccccacaccaaccccctatcccatcccctttctgctccctaaggagggtgaggccttccatggggatcttataaatctgtcatatcatttggaacagcgcctagaccctccccagtgtgtataagctgagagagtatccctctatgtggaatggattcccaaattccattcatgtactagggataaatgcttatccactaccagaggccccagagattaaccagacctccaaactgatatcctcattcactagacactagaggcctttcaagcaggaacaaataccctgactggagcaggaacagagggatccagggtgagtttgtctgtgtgtgctgggcttgtctcaagacatgtcttccttctcccaagagcatcaaggaaccaaacccctggccagagccagtatttgacttgaggacctaactctggccagaaacctgactgtgaggtcctgtcttcagcctttccctcctgaagaggacaggaaggcctggaaaccaggccctgaccagacctgggagctggattgagaaaatcctgtgtgcaacttgtttatatatataaagccaggtggaccctgactggctatatgtatactcaaatgagatacagaacagggccaatcaggagtgagctgtcaagcccaaaaagggaaagagaaaaagcctgccaaaacccaagagtgttctcaatcctgctgctactctatgccacaccagccatccacccaccacccaccacccccaagtgttggagcaaatgctaggaaagcagaaagagaaaggcaagaaaaacactgtttacccacccattctggctatacttgccacctggcaaaaataaccaggggcttcagcttggatcagcactagagccatccaccacaaccttgatggtggccaggaaaaactcagagagagagagagagagagagagagagagagagagagagagatgtgtgtatgtgtgtggtgtgtggtggggggttctgtgctttatcactagcttttaaaaagcaaaaaataaataatataaattagctgaaaaataataatcacaatcaatctatattttctatactttttaacataagaaagggcaacacagaaaaagcagcataccctggggaaaaaatacccttgagaaatgttctagatatatgtgaagaaccagcctgtctccatattaggctttttgtttgtatgtttgttttctttttattttttctttttttgttttgttttgttttttgttttttgagacagggttcctctgtatggctctggctgtcctggaacttgttttgtagaccaggctgccctcaaactcacagagaccctcctgcctctgcctcctgagtactgggattaaaagtgtgtgctctcacccttgccccctcttaggcttaaaacccatcatatagtaaagacaaactaggttcgtcttgtttatgattaaacctctgtctttcaaggattgggctgtgccccacctgcaaccttcactacaaatggttcttcactgcctgttccaggaatgacaatcatggcattgtttcaaaaagttgtccaaaaagtacatctaacaaccttactttgtttcaaaaggttatatgactacctttgactatcttgttatgactactatgacttgttatgactgttttatactggcctgcccttggggaccaaacaacagcagggcaagtcaccagcagcagccaagatgtgacactgtggctattaccaccactggtcatgaactctgcctacgaacatgtgctctatttccttatgaaaagtaagcactttctctccctgccccctaccctctttccccttctactagctcagagtcagaggctgcttctgaacccctcccctccccaaatatgagtactgttgcatggtgtgacttttttggcacctcttggctccaacctcccaaggtcccttctgccattaaatcattacaatgacttcctttttatgcccacctggcaaccatgtctttgtttcaggagaccgttgggacaaaagtgtatgcttatgttctgctcctgtaaccccacttattttgcctgcaaatccagcatttggaaatatgttatgggatatttgtacactgtgtgaaggtgtagtgttgtggttggtgttaattaaaaacttgaatggccagtagctatgcaggagagacaggcagtacttccaaggagaaaaaggaaaaggagatgaatcgaggtgagcaggagactaaggaagtaggacacgcagaataaaaggcaaaaagctacatggtaaaatgtagatatataaaagcaggttaatttaagttataagagctagtgggacaagcctaagctaaagatgagctttcacaattagtaaaagtctctgtgttatttgtgagctggtggcctaaagaaaaatctgactacagagacctacttctgagctataaaagccttcctcacatccaatgctgacctcctgaaccctatcttaagggaaggaagcccatatacacaaattacaaagtttgttttaattaattcagccatgatgatttgagtcagtggtctttctccttccatctttggaattaagatacgcaaggctacattgttcaccggcaggccaagggtctagaagagtgtgccttatgaagcaattagttttagtcaatgaagcccttccatgtcgatgggatccaagacgggatccatctagttattcaaagactgatgacacctccgtatccagcccaccaatcctcttgctgaacttaaaacctggtcagcaagaaggaagtagagatgctgtttgttgcagggttttttttcagtgttttgttttgaaaccctggtggaaaggctttgttttgacctggccaacctttatcctacaaaactttccaaacaaagcttccaggcttgggggtttccccatgttctcttgattcctgtaaactgcttgggctttagtcccatcacctcagcttccgtttctatgcctgcttcctatgccagctctttagaccacagcttcctaaatctgcttcccaaatacatgacccatccccaccccccaaacctggaaagagtgagcccgggaagacgtcactagataatgtctgacaaggacagaagtgagaagcagaagtgattgtccggaaaggggcactgagtcatgtttacattttcaagctctgtcctaccacccttcctttctgtgaccctgtgaatgggcctcaggagtttccttgtgcctcacaaaagaagccagtgaaggcccctagtaccaaatatcaaatatcccttgtgaaacaattagcatccctgccagacatggggctccaactcaaagactgtcaacattcctctggcttggctgtccagctagccacagaatcagccaccggcacaaccaatagcacaaatattgcccactgcctcagccatttgttcctctttctagaattcctatggaaattttcctatgaaatagatcagagaagatgaacaaagagctccccctttgagcaattatctttcactcagatgaaaacaacagaaaatcattctcagatttgcacaaacaaaatttggttctaaggcgtatatgagctgagagaagagggcaagcattcttcagttggttcaactgtctgatctaaatgaaagcaaattcctaggattccccttcagctagcatcacagagcaaagccagccctcaaacaaaagcactggcccaacccaccaatggggactgtcaccaggaataaacatctgtagtcttaactcaccccagaggtctgggaagcaggaaatccaggcatttgttctttccacagaacaaaccaaccttgacacaacaagagacaaaaacaaagcagagcaactgaaagaaagagaaataggtgtgactgatggaaggcagaggagaaacaggatggaccagggagggggggtcaggaatgtgcagtgtaaggaacacttgattggcatttacatacttgtcttctaagcaggaggctttacttactagcaatccaattgtgcttgcttaacctggtttgattttttttcccttcacagcagagaaaaacttggtgaagcatagcttgtgtgtcacactgtaaattgtatacagtggttgttcaatcagtaagcatgctattctagaatgaggtcctccagcattacagatctatgaatcactgtgaccaggatttcacaaagtcatttcttttcctttccctaaaaattaagaagaaccagaggctagctagcctaaagacctagagtaaaaaccaaataccactttaaaaacaaacaacatcaaaaaccaataaattaattaataatggtattctgctatactcatagatcagtgccttatcatcatcagagaggctccccctggcagcagatgggaagagatagagacctacagctaaatattatatggaaagagagtctaagttgaaggtctccgtcaggcccctcccctcagaactcagggaagaggagaaagactctaagagccagaggacaaggacaataccaggagaacaccaccttctcggtcaactaagcaaggctcgtatgttaactgttgcttgggtgtttctgaaaatatttcaatacaatctgacagttaatcaaaaggttttgataatggagaaagtcacagaaacagggcagagtaggataaacacccaaggaaatgacactgagcagaaagataagtgcagtggtaataaagaagcaacgcattctcataacaactgagagcttggcgggagctaagaagcatgtggacaaattttgtgattgagatgcataaggaatgactacctatctcaagccaatgtatcagctgaaggcaggacagattattaaacccactgggatacccaagagacatgctaaagcaataagatgctggtgtgaccaattcatacccaccaacatctccacatctgcagaccaagctccagagctgtggctcaagaacttgctttgcctggttgagtccctcctcccttctctcatctgccctctccataccacaggcctacctccagactaggctcaaatactcaatactggctttacctgacaaacatccagtgaagcaactttacctgccatagctactgtcatgtagttcctgcactggcccaatctaagccagcttagagtctcacatcagacacacaaccaaaagcaagaagtccacatgcccaggtcacatagcaaaactaaaaacaacatgaaagatcaagacagcatatcttccaccaactccactagacctatagaaatgttatttaatagaaagtacctagataaacaccaggccaccaaatttaaaagaataatcatgaactttatcaaataattcgatgactttaaagaaaacacacttcattgaatttagaagatagcaataaatgcatgagtgatatccaagaaaacacgtatatatggctaaatgaaatcaagaagaaaatagttggatttgaaaactgaatccagtaaatagaaatagtggtgaaaacccaagctgaacttaggatggaatttctgggattttgttttttacttttttttttaattggagagtgctggatgtctctacaattttgttcaaataactgcagaacctggaaaagctgttactgctattgatgcacaacatactgccattattggtctttttatataaatatatatatataaatatatttattatattatattgtatattatataaaatatatattttatataaatatatatacatatataatttgaatttttggaaactttagctgtgctgtcaactttggaaaaaagtatcccagtttaccgtgttgagttgacattgtacaaaaattaacagccatattggtctagaaatgttgaacttaatttttttccatttgtacaggggtaacgcactgtattaaatatgtaaggtcttaaaaaaaaaaggagggattttgagagcccatcccttgtgaagggatgctctcttgacctggacacacggggaagggcctaggcctggcccaggatgatgtggtagactttggggagccccttttgaggaccttaccctgcctggggagtggaggggggatggcttagggcaggtgggatgttgggggtgaagggagggagagggagaagggattgacatctgaagcaagcttgttcctaatttgaactaataaaataaaataaaataaaaattaactcaaggaaaggcctcacaaataggatggatcagaatcggcagggcttgaagatgaaggagagcaactagaacattcaaagaatatttcattaaaacacactaaataaacctagaagaaccatgtgggaccatgaaaagaccaaatctttaagttataggcatagatgaaggagaagaaccccaggtcaatgacagagactaaatcttcaataagaacataagactgaaacttcctccaagttaaggaaagacatgcctatatagatagaagaaacatgaacaaccccaaatagacagaactagaaatagaaactccccatggcacattatagttcaaacacctaatatatatatatatgtgtatatatatatatatatatatatatatacacatatatatatatttcatatatatatatgaacataatatatatatatgaacaataacaatgaatatgtattggagccaggcagtggtggtatggcacacatctttaattctaccagaggcagaggcaggtacatctctgtgagttcaaggctagcctagtctatagggtagattctaggagaaccaggactacacagagaatccctgttttgaaaaacagacagaaatattgaaagtttcaagagaaaacacccacacaagtcagatataaaggaaaacccacagagcaacaactgattttcactggaaacttttaaagccagaagagcctgtaacaatgtgcttcaaattctaaaagttcatggatgtcaacctagactacaatacccagcagaactctgtcatagcagatggagatagaaaaattcccatgatatgaaaacaatttagtccaacaagtcagccctaaaatgaatgctggaagcaacactgtggaattaaaaggagacctaaatgtagccaacattgtcacctgcacacacacacacacacacacacacacacacacacatacacctagataacaaattctctcctctgcgcaaacccatcctctcctacctactccacatacctttaccaatttcattcatactccaggctccttggtgtcaaaaaccttaacttcttctctaggaagctgagaataacttctagaaggcagactttaaatctcccgttctcaccacatactcaaaattccttttttgtgaataaatcactgtggggaatgaataaattgctgtggagaatccatattggactcttctgacctctgttggattataattataattaaacatcaccaaagactactcttctggaagccctttcctttctgacatctaaatgcttgttttattcggtttgcttctgatagaaagcttttatttactttcctataatctttgccttgaatcagtcctaagtttaaaatggtccactctgtgcacacatattttctattgatcttgttttgttgttcattttaactgacacagattcacatgtttttatgaagtataatgtgatgttttgttacatgtacacaacaggcaatgatcaaatcatgatatgtagcacagtcatcacatcaaatgcttgtcacttcttctgttagaacatggcatatcctctagttgctttgaagtaaacagcacactattattaactgcgatatttaccctattgggctacaaagcattcatgcctgttcctcctatctggctataattttatctccactgacttatgtttcataatcatccctgtcctgccttcccagcctatgggaaccattagtctattctacacttctctgaaaacatctgtatgatttgacacagaagtgagatcaggcagtatcagtctttcatatctggtttatatcattgtatgcactgtttcagcctcatccatgctggtacaaaagacagaatgtcattcttgtggcttagtattgtctattggctccatgccacaaggtattttccttatccactcatattggtagacacctaccttgatttttaccttggctacagtgtgaatagtgacaataaacataggagttcagataacttggtgtctggtttcatttcctttggatggatactcatggtgggaatgccagatcacttgctaagtctacttgtattgttcgaggaatttcatagtggctgtacccatttacagtataccagcgacagcatataaatagactttgtttctccacacccatgccagaacttattatttggggtcttacttttgcattgccatcctaattaaggcaaaacgatggggctctcattgtggttttaacttgtatagatgatgtgctttttacatgtacttcttggctatgtgtattcatttgtcatcttctcaagtcctttgcctgtgttttaattacattatttggtgtgtttgttactaaattccttacattatagacattaattactttccagggacttagtttgtaaatattttcctcccattttgcaagttatattttcattctgttaattattttctttattgtgcagaaactttttatttaacatcacccaatatgtgcaattcttgctgttgctgcctgagcttttaagttttttccaaaaaaaaaagtatcatgaaattttccattttttactaattttattgttgtaagtcttacatacaattttcaatctactttagttattttttttttatgtgagtgttgttcttttgtttcagtttcgagggttgaaacacaaatcacaatactcaacacacccatgtggagtttactgggggaagggaacaaggggaaaaacagaaaagaagggtggaaggaggaagagggaaaaagggccaacaggctgaggagctctcttaaaagggaaggcttgcagatgcatacaaagtccttacgtggccacataatgcatgacgtagccacaaaacacaggaccctttaaactgtctaagttatctacctgaatgccagtgtatactctgcccattgtcagagggtgaggtcagcataatgcctgggtaccaacagtgagaggtagaggttatcaatacaaaatggagttcttgtttcaaagaaaataatggtgatttgttctcgggccatatatgaaggacattgatttagggactagattaagtttgcagcagaagacatgtttcactgaggaaatggttatatgagatcttcttagtcatcttgatccttaacattctagcaaagatcaactaaagattgtattcattccagaataaagtaagtcatcaatcatggcactgatggaagacattggtggggaccgcaagtaagcgtgttacagaaaagtggggtcagtgccataggtctcagacattgtctgatcacattgttggtttctggcttggtggaaagctggtgctttccacaaataactacttttaaagggttttatagtcttaaggatgttagttcagacaagggtgtgaaaataaagagctcttcaggagactaaaaatagcccaagatcgttttgggctctggtctgcaacattgtaactttccacagagtttcattggccttgtaaaaactcttacaagcttggcttttgttttttctgggaagttcaatttctaggatctattttacaagtacagatcaaattttccctggaaacatttgatgaagagtctgtcctttcttcagatttaattcttggtacctttgttgaaaatacatcacctatcagtggatggaccggttcctatttgctatgttcgattccttgtgtctgtgtgtaaaggtcagaaccacactgggttgttgggttgtgctctcatagctctggggtacattttcaagtcagagtgattcccccagcattaattttgttcaagattgctacagggggcggggggcggggtccttttgtttcacctgaagtttagcattgctttttttggtctgtttgttcctggacggtatttggtaaagattccataaaacctggagatcattttggacagtgtggacatttaataatatttattctcctaatctatgagcatagaaaaaaatcttttatttatgtcgtttggatcctcttttcttttctacatgtttctgtaggtttggtttttggttttgtgcagggacatggacccagcacatgctgaagatctaccaatgaattacaccttgatccctattttatagttttcattgtagcagtctttcacctcaatagttatattattctcaattaatttttttgcctattttaggtaggattgatttcctgattccttttcagacagctttctatacacaacaataacaaattgtttctaattttatttatttctacatagtagctgtgtgagtacagctaccccaagatccccaaagaggggctggatcctccggaactggagttgcacacaatagtgagctacctgatgctggtgctgggaactgacttaaccccaatcttctgaagagcaacaagtgctcttaactgctgagccatcatctctccagcctcaagaagcaattttttaggtgctgactttgttgtatcccacacctttcaacaaccccctggatccatttattaatttttaccagattttgatatgatctaagtttttctatatccatgatcatgctatctacaaataaggataatttgatacccctctttcatatctgatgtcctttatttatcttgtgtaatgactctagtggaaactccagtccatttaacacaaaaatggcaaacttgttatgttccatatcagaagaaagcttcagtattttgtgttcaatttgatgttaagtatgggtctggcatatgtagccttttattatgtttaagtatatgttccttctgtacctagtgagttaaaccattttgcattttttattaattaattttttacattccaatcccagttccccctccctcctctccttccactcctcccactcctcccttttcccatctgctccacagagagggtaaagccccccccacctaagaagtctgtcccaacatctagttgaggcaggaccaaggcacctccccacccccgacccccctgtgtctaggctggacaaagtatttctccatatagaatggactccactaagtcagtttgtgcattagtgttagatcttggaccttactgccggtagtggcctcatataatgtcccagtcacaccactgtcacctctattaagggagtcagtctagttcggtcttatgcaggctccccatttgtcagacctgagtcagtgatccctcactagcttgggtcagctgattctgtgggtttccccatcacggtcttgactcctttgctcatataatcactcctccctcacttcgattgtactccaggagcttggcccaatggttaattgtggatttccacatctatttccatctgtgtctggagggttcaagtttctctggggttatggattgtaggctgggtatcttttgttttatgtctggtatccacttatgagtacatactatatttgtctttctggttttgggttacctcgcttaggatgttttgtttttttttttctagttctgtccatttgcctataaattttaggatgtcattgtttcttgccactaagtagtactctattgtgtaaatataacacattttctttatccactctttagttgaggggcatctaggctgtttccaagatctggctattacaaataatgttactatgaacatagctgagcaaatgtccttgtggtataaatgtgtctcctttggatatatgccctgatatagtattgcagggtcttgaagtagattgatccttaattttctgagaaatcagaaagatttccacagtgactatacaagtttgtactcccaccagcaatggaacgagttaaatttttaacatgaagggatgttacatttattgaatgtttttccttagtatattaaacaagcatttaatcatgcaaaaataatgtatcacatattgaaaatccttgcattttacatcaatctccgattgcatggtaaatgctttttcaatgtgctaccaagctcagttctctcacactttttcaatttttttgttacttttattttgggaaggaggcttgtatgtgctgtggagtgcctgtggaggtcagaggacagcttgaaagagttagttctctccttccactccctggcttctagagatcaaactcagtcttcaggcatggcagtgataccttatctgctgagccttcttactggcctaatgtgttcatatttggttaaagattttttttattttttgttttttgggtttttttttttttgcatccttgttaagtatatagcctttggctctttctgtatttcttccttcctttctgtctttctttctttcttcctttcttcctttctttcactatgtccttgtctggttttacagacagaaataatactggccttgtgaaatgatttctgaagaattttctccttttcaattttaggtgtaatctaaaaaggtttagtacttcataaatatttaaaagaatttagcagtgaatctaccataccacaagtttttatttggagaattttttattgcttatttaatcaccttctgcttattgttcagcggagattttcttctaattcttctcctcacccctcacatgatgtatatattcatttgtttgaggtttaccaatacgttagcacatatgctaaatgttaatcatttgtgattcctatggtttccactgtaattatttttcattcttgattttgagtcagttttagtttattttgctagaaatttggttttgcttgtgttttggttttttttggttgtgtttttgatccagggtcttatataacctattacatagcttaagatgaccttgaacttctgattccaatgtttctacttccaggggtgctgggagagcatgaacatgccactatgccttatttatgtggtgttggggggtcgaacctagggtcatgtgtgtgttgagtgagctacatcctcaacccagaatgttgtttttaacaaaacaactctcagtattgtgatgatcactcacacaagtgatagtgtgctatgttaaaaggattacaagttctagccaagtctgtcaagaaactgtctcaaaaaaagaaaaataatagtaattcttcattttgtatatatttttaaatatctattttactctgatcgtgtgtgtgtgtgtgtgtgtgtgtgtgtgtgtgtgtgtgtgtgtgtgtgcacgtgtatgtacacttatggggaacaagcaaagtcctaagtgaacatgtattgttgacatggacgtggccatatcaaaaaccatgggaatgacaaagtattccccaggttattctggcaaatccttccccaggtcaggctcgggagaatggcaaaccttcccctggtagtgtgtagatgttgacagtgtatgcagaaagcatcaattgcagctacgccctccctagtgtgtacagcctgagattgcttcctatagagacatgctgcaacattagctaaacccacctccttgctcaactgtatccagcaaactcccctccctcaattcaaatatataaaataaatgtgctgagtttcctggccactgctagagcatctcagcaagagcatgtggcctacttggtcccagcttttctgtatatgtgtcacttcctcgtttcctctcacccagtcaggtctgtccttaagctgttcaagtcgtagcacacacaagcatgtgttcatgtatgtatgggtacacttatggtacacttatgagtgtaagaatgtatatatgtgtgtatacatgcatgtagaggtcagaagtcaagctcaggtctcatttctcagatgtcatccacacagcttgttcagattggccaggagctcaccaagtaagctaaactgtctgttaggaatggttaatagaatatttatatccctgttttcctaatttgaaagtgaggcataaaaatagaatttctcgatagtggtgcacgcctttaatcctagcacttgggaggcagaggcaggtggatctctgtgagttcgaggccagcctggtctataagagctagttccatgacagactccaaagccacagagaaaccctgtctcaaaaaaccaagaaaaaaagagagagaatttcattaaggtctgcaacccaaaagaggccccaattaacatacacacaaatacacatatgaatgcataagcattagcctcataaaagtctacttcatggcccacctaaaaggaatctgcaaagcacatgtgtgttcagttatcaacacaagtgatggtgtgctgccttgcaaccagcaagcctacaagcatccagaaaacaggtaccactgatcaggtgcactcgcctgatggaaaggaggaatggagacacacatctgtaatcccagcacttgaaactatgaaagcaggagaatgaagaattcaaaatcatccttagctatatatgagttctatgccaatgtgggctgcataagatagtgtctctaaaacaaatagaacaaactggaaatatgctatgaatagccctaatgtactctcagtgtttaaacacacgtagggtattccttgcctgtagattaaagtttatactgaatgtgacatttcaggccccatctgatgatcccaaatctctatcttaagcttcatttttcccttcttcattgccacatacactgtagctaccctaaatttgactaagcaaaataccctatcatgatttacagtgtagtgcatctctcaaccttcatcagaaaagctttcttttgcagtgtatgataatctacacagagaccaacagctggtcaaggtgcagacagtaggagactttggaatgctcagccccaattgaaactctgttatcatacctcctcctccttccaaaactcggggatcattgcagaagagaggatggaaagattgtaagagccagaggtggtggatgaccacaaggaaacagagtgttctggacagttgcacctatgaattcacaccagtagtgacaacatgcacaagacctgcacaaagtcaagccagctaaaattccaacatggagggggtgggggcaaaaagccccacctagccaaggagtcattggcaattgatagctgctgggagagggaaagccagttttctttgcgggtgtggactcagggcaggtggactatgctccagcaaaagggcacacatccaagaatgtaaaagtagcaaaattacttgatgtgttttttaaaagaaaagtaggacacaagagtcggtggatagaaaatggggggagtgtgtacctaggaggggtgaaggtgaggagtaaatatgatcaaaatacactctatgaaattctcaacagactaataaatagacggaagaaaaaaactatcctgccaggccatgctattttatcttacattccttctgcctggaaaacactcttcctcattctccatgttttttcttaaaggtcactttgtctttgaaggcatttcccttgctattaatcccaccatctgtgagcacatctttacatctttatgtaactcatttcttcaggcatggatcacctccaaagcaaaccacctacctgcctgtcatcgtgccgcattgaggggccctgcacagcccccatcctggaaagcacactatctagtggaggagagagacaagagacaggattacaaataccactgcagggaaaatgaggtgctatgggagtccatggcactgtgataattacccaagaatataatctggagtgaaacttaagtcttagagcattaaaaaaaaaatcaaccttgaaagactgtgtggaggagaaactctgggtagagaaaaacatgagggaaagaccaagttgaaaaaactcctggcaagttcaagagctaaagagaacatacttgagcatggggataacgggggcatgcattgcaaacaaattgatgaccagacagtcctattttcttttcttttttaaaaatattttttgttgattttatttcaatttcacatcacattcatttcccagtctttccatatctgccctccacccttataaagtgcccctgaaaagataaataaaaaataaaaattttaaaaaaatcactgtcttagtttaggggtctctatagctgtgaaaagacatcctgaccacagcaactcttataaaggaaaatgtttaattggggctggcttagagtttcagaggtttagttcattatcttaatgtgccatgcaggcagacatggtgctggagaagtagctaagagttctacatcttgatccacaggcagcagaaacaacagtataactcactgagcatagcttgagcaaaggtgagctcaaagcccatccacacagtgatactgtttttaattattcgatataagtttatgtacagaagcaccacaaactatattttacttctcagcactgttagagggttctgtaaccagtagttaacaaacctttgtaactagtagtttaacctttactcatttttgtaattgttactatctaccctcagtgttttagtctgattttcttgttttttatttttcttatttttttttttgccaacaagcactagccagatccatttcttaaccttctttcttttaccaatgtagaaattatgtagctgattttatttttagcttatagtcttggatttctaatacactaagagtcaagtcaatcagcatctcctttctttagtgaaaagcgcagggcctttggcacctgcaaattcttccccactacttcatgactcctcctttacagcagagtactttctttccagtttcttatgaaacatacacagttctgaagggaccgtagccagcccaggcgtggtaaacacagctctggcaggccttgcccttctctcctgttccctgtcccttgctaaaaccagactttatttctgaagctagccctttatttggtttattctcttatttggccacttcctcctcctgaggctgactaccaaggtccagctatcaaagtactgaagtccaaaaatccaaagcccgcattggctcacctaactaccaagcctaattaaaattaaacacctcatcctaagatggggatttcccttgtacctttattaacctccattttcctatgggccacatctgtctcctctctagaggcattcctttgtacctccgggacaaataaccctgcttttgttcccttccccttctccctcttagtctcctgtctttgccccttattcccccttcgctctgtccctctggggcaaataaatgttcttggtgctgagaacttggccttggggttcctgatatgatactttccctttcaagttccgccattattttatgatagcttgttaatctggtttctctgttttatgcctccttttgttcgtcattatttcacttcattactttgctctgtgatcatttccattcctactcaagagtagtcctcatggtgacacagcatgccattctcaggtcttggcatctagagtctgatatatgacccaggacttaaatgataatctttgccagccacctctcatctgtctgtgatatgaacagccagcccccggcccttgcacaagctaggcatgtactttgagtagtattctccagcatgttacaggatctaagaacagtgcctgctcccagagatcaagaaatctggggtccctaaaagatacactggcttcatatggaccttcttcttactgtatccccaggatctaggactctgggagcttcctgaccaggtggcaaatgctatgcaaaggcttttggtaaacttttctggttcccatggagtttatctcctcattattacttagtagtggctctgtcctactttttaataggaacacattttcctttgctcattctgcagtcagctctgtggaattgtgggcatatatgttaatgtgaaaaatatcatagctaataaatctaaaccctagactgaacaatagaagggttgttgagaagggaaagtgatctttgaattcactatatccactgtcttaatttgacatgtaaattaaatgtaaaattaaatgaaataatttgattcacacagatcttcaaattatgttaagattaaaattatctaattatggattaagtaactcttctatggtccaaaccataccttggactatgattaactctgacctgggacaaatcacttttgttttacgatataattacttctttatcaaggagattggtatgagttgaacacagtgatttccttccaaagactttagcctgggagaggaagaagggctgccaaaacagcagtgttgccagtgagacctgacagggtgtcctccactagctggtcaaaggtgacagcaacaggatgtcttgctaacaatatgtacactttgccatgtgatgagactggcacttcccatttacatatttcctcttcaaacccttgtaaacacaagaaaactatcaatcagatgccaatgaggaacatttctacagaaaaacaaaataagctgtcaaattcataaagaaacaaaataaataaaaacaacccaagggaaagccagacagattatcatgattgggaggcttctaaaagacaaggaggaagaagttagctgtgttgtcgtggatggaatctaaggcttacaagtaaaaatccattaaacacaaacaatggggcatcggatacttctcagtaaacagagcagttatcgagcatgtgtgaggctctgggttccattctcagaactacacaaatcaatgtgttggcaccaccagcctccaatcccagcaggagaatcagaaattcaaagctatcctcactcaactacatagcacccaacctgagttggtggtgctgattcaaaattcaaaatcagggattcaaaaccatatagggtatatgaaattttgtctcaaaagcaaagaaaaaattatgactagagtataaaccttaattattatgtgagcacaattttgttacttataacaaactagcaccacatattaatgtcaggtagtaacaggagaaattaaatgtggctaaagcagaatcttctgtagttgtagtatctttgcagacttttctgtatatctgaaactactcaaaaattaatgtccattaaaaaaaaaaaaccatataccagcggggccagagagatggatcaacagggaaagcacttgccttgcaagcctaaggacctgagttcaatccccagaacccatgtaaaggtggaaggagagaagtgacttcccaaacttgttctggcctccacacaggtgcttggcatatgtgcccacacatacatagtactaataaattttcaaaaaattatagagaaattgtatgagatagtctttaaaagaggttttagcctcagcattctgagacatcaaataatgaatctccaaatttaaaaagagtagaaagaaattctcttattgatgatataaaatcgggtcatgagttctcaacagaataagtatcttgttgtcatttcagatatatccgtttgtcaccttcctttttcacgttatattttctaaatgcacaaagatagcataggcacaattcactctttgttactagagcacggtagaccagtgcatgagttaactacagagtgttagtgtagcgtcacactggtgacaatcatattctaatttcagagaaatgaatgcattgcaagttcacacatgcaaacataattagcatgacacttaggaagtatatgcatctgggttcaatctccagcaccacaatggaaaataaataaatacccaggcagtggtggtgcacacctttaatcctgcactcaggaggcagtggcagacagatctttgtgagtttgaggccagcctggtctacaaagtgagtcccaggacagccagggctgttacagagaaaccctataaaaccaaccaaccaaccaaccaaccaaccaatcaatcaatcaataaacgcttttgttaccaatggactttgttctcagagtggtaaatcctgagttggtaaacttactttccagccaacactgtatcccagagtttcatcttatatacatataatctttggaatgtcatctcatttctaattatactttctatgactactaacaaagttaaacattttctgtgtgtgtgtcccattcggattcctgtattttgtgttataatgaacattttccattctttttcttcctaataatcttcctaattttttatatcttctttacattaaccacttactggatatactcataaatgcctcacccaactatgtgtgatatgtccattggctttcttctgaaagacccccaaagaggtactttcgtagaaggagacccgcacccaggaatcagcgagaccacggacttggatgcaaaagcaagaggctttattagagacgcgggtacccggggcgacttagcttctgtgtggctaagcgcgccgagccaagggaaaggggtccttatatagggaaaaaggcgcaagctagaagcagggattctattggataattctaatgaggcattgtacagagctattcccattggtcaatgtaaatgaggcgctatacagggttattcaaatgaggcgaagtatagagttattcaaatgaggtgaaacacagagtctttcaaatgaggcgaaatacagaatcatttctattggatggttcaaatgagacattccagaccagcatattctcaaggtctggtgtctgggacaacagactcaattcccccctccgcgtccagatggctgaccttgggggcagagaccttgggacggagtgtttctcatcaggtgggggtgtgggggcggggccccgggccggcctaactggtgctctcgccctcgggccaacgcacctggtgctcgccctcgggccggcccacctggtgctcgttgctcggccccagccccgaggcgcggtgccaggcggggcgggccgggggcgcgagccctgccggggtgaaggcttgggaggccccagcagctcctcggcccccgtgtccttggccttggagatggctccccgctcgcagctcctggacaagcagcaccgctgctctcccagctcaagttccccttccaggcgccacccgcgctgcattctccagcccctggccgaaccctggccctgccctgctcagtcccctccgcgctgccctcagtcaactgctcctcccgcctgctccagagggaacacccagcgccggcacaggcggggaagacagaggggcagggggcatgcagaagcattctgagcgggtctttcacttcatgatctcttttgtcagacagatgtattaaattttgctgtgatctgaaagcttgtcccatttaatttcacttattgaaccctcacccccaaagggataatggtaggtagtctcgggaggggactaggacatgaggacagaagcttcatgatgagagcagtgctgttagcaaaggatcccagagctacactgagccttctatcacgtgaggatgaaggaagaagctgcagtctatgtattagaatgtggaccctaaccggacattaaatctaatggtatcgaggcagaggcaggcggatctctgagttcgaggccagcctggtctccagagcaagtaccaggataggctccaaagctacacagagaaaccctgtctcaaaaaaacaaaagaaaaaaaaaatctatcggtaccttaaacgcagacttcccagccgcagaactgtaaaaaataagcttctcttccttttaagttacccagcgtattgtatgttataggagtgcaaatgaactgagacagactgtactgtagtagaattgccatgtgcacacttgcttgcttgttgtatctaaactttatttctatgtttgatatatttgtgtgtatgtctgtgtggggtatgcttatgtgaatgcagtgcccatggatccctcaacaggcactggatccctcaaggatcccagtggtactgggtcttgaacgcaggctctctgccagagcagtacactctcctctcaatctctggaccatgtcttcagcccctctggtttgtttttgaaatactgaaaatatccttctctgtttcaatgctccagtgatattctcctacattttttttttcctgaaaggtttgtagttctaaatttaatctacatggaggttattttcctttgtggtttgaggtaaggattcatttgcaagaatccaattgttctcacatcatttgctgaatcatttgtcctaatccactcatttgtaatgttgcctgtgttaccagcctaatgggttctgtgaagccttcactagttaagttgcttgtataaatgcagatctatgtgttttaacccaagatgctaatgcaatccaactagaatagagaccacaaatctacagtttcagctataaacctatggttcaggtgcaaatggcccataaaccctactttgagaaacataatccaccataattcagatccccagtactcatgtaaatgccaggcaggcagagcagccttgatctcagctctcaggaagcagagatgagattcctgcagcaaaccaaggctacgtagacaagctcagtgtgagggctctgggttcaagtgagaggccctatctaagtacataagatgaagagtgatagaggaagatacctgacatcaacctctagcctccgcacacatgagcacatgcatgtgcttatacatacacataaacacatgcataccacatacatgaaagaagtatggtcccaggcattagtaaacatgcagtgtgatgagtccagaggaaagtattctagaatacagggatccctccctttaacagcccattctcgcccatggggcacctggcaatttaacacctgctagtcaacagctcatttcaagacaattcaactcacagaaatttaatcagagaggctaaagcatccttccctctaaacttagaagctaacactaagcaggtgggtatatctgaacagctaactacagcatagtaattagcaggaggcttgactctgcccttgaacaggactctacttcccacacacaacagtgtaacattacttctgtactcctcaacaagcttatgacattggcacaagaaataaattatcagacatatgagcagcacacacactctctccccctccctctctctctcttgcacatgtgcgcgcacgcgcgcgcacacacacacacacacacacacacacacacacacacacacacacacacacgggtgactacaatgggcaaaatttgcttttgaaagtctatcacactcagaaaacttggaaattaagcaattagtccatgggctcccacttgctaatttaaaagcaaaaataacaactacttagacactgcttttgctaaaaatcactgactcatgtgggcccacaggtgactaaaagcagggtacagtcttggcatccatctcttcatttgcatctctctcctttgtcttaaaactgggtcagattcttgctcagctctgcacacagacacattaatcactccatgagtctctatccaagctcctgctctcttgcctatctcatgcctcttccaggctaaaggcacagagattaaaagtaactgcggtatgttcctgttaccttttacagcgtcctgtcccacatatccaaaaggtacctgaaggtctctatctctagtcactgtcctaaatctgtagtcaccttggatcccaggaagggcaaatccttgcagactggtcacccctttgttggagcaaaggtctcatacaaaccagcttgtccccacaaagcaatgatttcttccacctgcctttcaaaaccagaattgagataatgctcaaccacatcacaccttgaccaagctggcttaattacaccccccacctccagcccagttctttcttctctatctaaagcctaacgctcacatcagtggaaaaactggctgagcccccgagccttgtgttccccacacagttttgtggatttaaatcctttccaactgttgctcttaagaatttttatttttaattatgtgcatgcaggggtgtctgtgtataagtatgtgcacctgagggcaggtggctagggaaggatgttggaatgcctgcagctggagttgcaggcaggtgttaatcctcctctacctaccctcacatgctctatgggttctgggaagtgaacttgggtcccctgcaagagccgcaagtgaccagagtgtctcttaagctttaagccatgtctctaacccccctgtttgtgttctttgggggctatctggacctaacacgttggaataacctccctctctcccaggaaaagtcagagtcctccacgttctttcccatcgttctttactccaatgttgttgttgttgtactggggagatggctctgtggggaacatacttgctgtgctagcataaaggccagagttttgatccctggaacccttgttagacagggtggattgaagcttacaatttcagtgctttagaatgggagggggtggcagggacagggatgggatcatccctgaaattgtgcaggccaactatcctggagtacacacaatttcaaacaacaaagagatcttttctcaaacaaggtaaaagaagaccaatactgaagctgtcttctgacctccaccccagctccctcacacatacacatacagagagagagagagagagagagagagagagagagagagagagagagtcccagtgttattaaccattagatctccaactggctagctttgtgtttcctaataatcatgtgtctcatataaggagataagggaccaaatataagtaaataatgctgtgtcatttccatcaaacaggatagacacatgcactgaaagggatgacttagaagatgactacctgatatacccaatagctatccagagtctttggatttctctattttagataacacatttttaattgaaataaaatcaacttgttccaaggagtttacaagagcaagaaattagggatcagtaaaacaaaccctcctctgaaatcattcatgtttataactgattccctccccatgggcaaactgtacaagaagaaactcctggaccccctgagtctcatcttgtttgtgtagcatctccccacttggaatcttacccagccttgctggcatgtgtttccaatatggagctgcaacagggaaaagttataattactgaatctcttccttctagctattgaaataaggtgacttgcagaaacgcaagccactacaaagagcacctccagaaatacatcggggtaaatgtggctaaatccctgggctcaaattcaagagaactgtatgcttcagagcctgacagtgtcttttgtctggtctgtgttcttggactgttacctaaaacaggaaaatcggctatcatttacaacacaacttctcaacagaatggacccctttcaagcccaattgctcacatcctgttgctggtattgactgaattactcagtgactcattctccaagatgtggctcttcgaggttcataattctccccatacttagatggctgcacttttgcatttaggtcaatacgtgggagagaaaacttgccttacaaatcaaccagattagataatgaaaactttcagatacatgttattttagcaccgtagatattgtgggcagatatttagatggaattactgcccaaatgagaatgaatttgggacatggaaactgtttctgaattagtttagcaaggactaaaaatcctgagtgttgaacagagaactcataaacaggacgaggagttacaaaagaggtctgggaattaaattttgccaataacaccacacacacacaccccccacacacaccaccaccaccacctgcactggcatctcttggaaccttgaacagagggcaagaagtgttgatatgatgtgaccaaaaagaaatggccagaaatacaggcaggtatgttgccaacagcattccttcccaagtctgcaatttagtttcagcttattacataaagcttaactcaaaaccattatgctgaatattagcgatttctcctcttgggcagaagtgaaaaaacgtgggtgattgaaaagctgagatgattagccatgaattgttttcattccattactttatggcaaagggagttggaagaaacaaactattagctagactccatccagttttccctcacatgaatggcaagagcagaactccacacagctcagctgcagaatgaacacagccacatattttcattatagaaaagtcatttccacatttcctagctctggtctgtaacaccaggttagtgagttgtgacactctcaaaaccaccagcataaatgtaatcctcctgtgggtgtgcaaaccagttccctaaacaagcactgcctgcctccaggtgctgctgtctagataaaaacaagacaaggacctaggctcagcacagggctgcctccatgtgtccctaccatcttacaaacttgctttgaaattgagttcctaattctcaactgctgtaaaagtactaaagaatttacaggtattaggaactctggcctagatttttaaacgacccaccaggtgtttcccattgccagctgtttgtgagccaaggccattctcattcagggcctcctgtgtttacacaaagtgcttatagtcccacttgatagttgacaaagcagagggtcagaagtaggatgctgctctcagtaacaccgctaaatgccctcactggcaccagacctaagttgcttaccaaagcatccatcatagctgtagcaattaactaccaagcatttcactgcctccagcccttaactgcagagagctgtcttcaggtaggggtgtgtgtgtgtgtgtgtgtgtgtgtgtgtgtgtgtgtgtgtgtgtgtgtgtgtgtgtgtgtgtgtgtgtgtgcgcgcgcacgtatttttgaagtaatcaacaaggtttctcttctcatggaacttctttaccatcagaacttacttctctttccaaggttgggagttactccttcctgttccttaccttctgtgacacattgtcctccttcagaagtcttcttggcctatgtgcctcccccaggaagtaggtgctgatgagctgatgagagaagagaaaccaggaatgcacacccaaagccccaccctttcccttgacaaggatcaatttccttaaccccaagtccatccaaccacctcttgccagtttccataaagttcttgtattaaaaggcatttgcttacaaagcaaatgcttgtaattggtcattcatgtgccttaagacaacacattttattaacagagctttgatacatacatacatacaagataattctctctatatccaaagccaaggcacctgtgcctgttattctgcattctaatcatagctaactgcatatttttctttcaactctttacaaaaactaaaaggaattgcaaaatccaaaggatgcctgagatttctaagtaggaataaccatagccaaaggaagaattttaacagtgagagttccagacatcattaaggggaaacctgagcatgggcttcagataaaagcttgcctcagtaactgccacatactctggtgtgcatcgaatctggctggcagcaatcgatcaaagcaagttctgggggagacatgtagaaagatggaaccaacaagctaagaatgtgcagtactccaaatttaggtggatgtgtttccacggcaggaaatgtggggaagaaacgagtgcttactaggtcctgtggggttttcaaactgcagccttcttaagcaacacctggagagcctgcaatgcaatttcatggccagctccacctgctgcggttgcccgtgggggggggaggggcagagcctgtgcttttaagtgcctcatgtgactctgtggcaggctttttccctctcacattttaagttctctacatgttggcgagttccaagaacaaaataaggaacctgacctgtggatccctcgccacgatcaaggctcagcaaacttttccaggaaagagtttaacagtaggaatctgggggccttgtgggtgaaggcctccgtcagcattaccaagacatcataaaattagcagtagtcaatatgacaatatgagcttggctgggttctgatgaggattgttcttctgtgtatatgtttgtcttattggttgatgaataaagcactgttggccaatagagcagcaaggaaggtggaactaggatatgaagaggattctgggaagtgtaggcagagaggaatcgttatgtgatcccaggaagtgacatagctgggtagaaatggccactagctaaccatagaggtctggaggtctgtacaaacaggcaggaagtaacatagctgggcagtaacagtaagtatataagcagggacaaacaggaaatcgctgtcttctctgaggagacactgagaagatgtgatgtagaccccaatggagtaaaaaggcccagaccttttctccgataagataaaaccacatggaaatacttagattattagaaatgggttaaataattaggacagagctagccaataagaagccatagccagcagccaacagtttcataattaacatagcgtttgggactgatgcagctctggaaccaggctggcaggaagaatgcttgtaacaggtttccttccagctagaccttatttacagaccctgacacataatttacatataattttcatgtaataaaaggccttcctttccataacatacctaaaagcaaaaaccattcttagctctcagcagagccatagaacaccagaattcattcctccatcaacaataatgtattaaatatttccaagtgataaggagtttgactgtattcaccataatgaatgatgaaccttcaagtgataaatatggtcattacccaaagcagatcattatctaatgtatgcatatcagaactttataatctaccttgtatgtgcaattatgacattcaaaacactagataatgaaaaagcaaaaattcaccattattaactcaaaagtggagggaggagctaccacgttagtttggaattgtgatcatagctcctgaccttttctgggggtggcctttacatgtgttgaagggaccagctccccattttggcaatcatgacggtcttaacacgtgcttgcctgaccttgccttggtcactaggaggtcagatgcctgcctcatggcaaggaaccaatcagaagttagctggtggtgctatgctttatggttcttggtgtgctttacagacaagtgcacagcaaagacatgcagagcatagcaaccaccctggggagggcctatgggccataacaaccagttgaccaatcaacacagggcaagtcctccaagcctggaggcacaccaatcctgagcctgtgtgtacccctagacactccccttatgctgccctataagatctctgtcctgtgtcttctcagggtcttttccccagccatccgccatggtggatgggtgaaatcacccatccaccaagctaacaccattagctcgttaaacactgcaataaaagactcattgcttttgcatcgaaatgggcctttaaaaataatctatgaatatacttcccaactttcatagtattttcaattaaaacattttcatcgtgtggctaatgtttttggagctcccctggggcagggttgctcattcagaaagcaaactttagtcagtcagtgtccaattataccatctaacaataaagtgtgtgccagtattagaccctaagttaacctggcccgaggactaggtaacttctgggattcctagagttgtagtttttggaaaacaacaccaaagtctcatgggaaagtacagtggcctatgggttttgcccatataagtcccactaacatgtgtcttgaggccacccagctggaaagcttccaagtggtggttctgaccaaattccatcttggtgagtattcaaaattttaataaaaacttgcttaaatttggccaaaatggtagaactagttttttctcctgcaaatttcagaattaactcccaactgagtattttaaatcagcttcttcgtgttgaagctaaataaaagtgaaaaaccttcttttccaaatggcttgaatcacccacccaatgaactgtgagtaagatcttgttcttgtaaacaaggaacgggggatgggctctggaggactttcagggttgaaaagggctggggtctagatgggcagttagaacatttacctagcatgtgtaaggccctgtagtcaaccccaggactagaggggagaaagggctaagatatagtaagagggagacagaagagagagggagagaaaggcaggggggatgaaaagagaaaggagagagagagagagagagagagagagagagagagagagagaaggggggagaatcgagaacacagacaagccccagcccagagtgtctactaccatttgtagcaacctgaggtaggtcatcagaataatacattctgttactctattaaaggtcttcactctagaaatcctcaggttattaaacatggctaaataagtacctgaaacctcaacaagaatccagaagcctagcttgtacaaggctctaaatgcagctgagtattgggactatcagcatctccagtactcagcaggctggggagcaaagatctccatgagcaagaggctagcctgagctacataggcaggcctaccttcaaacagtaaataaaaagaattgcagaggatgaactccccaatctgcagaacagagctagtaagtatccaagcacttgtctgcctgaagagaatgtgccccaagaatgtgccccagggttaagtgcatgccttcctaaggaacgcctttccattggactgcctctaacattccttcacccgctaaggaatgaaaacctgttatcaggagcactcaacccttgcccatctcctccatgccccccctcctccacacaaagtaaccagcttaatggcataaagatatcagaagggtgtggtgaagttgaaaaacaggagccctgagcctgtctccacccctggctgagtaaacatcagcctggaggcagcttgggagttatctcccatgaggccatgcacctgcctttcatcttctcagacacacagtcttcacctttcaaaataatctatgcagcgctggctcaggtggaccctctgtcaaagacatagaacaaccattggttgacatctgaaaaccactgtgtttctcctcagtggacagccttgtttctggaacccaaggaagggcctcacctgagagaaaatgcctaccaagttgcaaatcaccttagaatacaatttctctgcacaaaaaggacacagcgaaaccgtggcagcagtttgggtgagtaataagcaaagactattcctacagactgaaaacttatttaaaaaaaaaaaaccaaaaaaactttcaaatccacgctccacctgatgcagttccattgagatggggactggccagcctgggtcctcaaggccctggctagtgggaagacagccatgtgcccacccagcaccacaaggtgccaggcaggtggcctcattatgataagcaaatccgtggtggagaaatgagagagggagaggtggaattgttcattccctgtggaaagacatggaaaggaagaaatgaaggcagtgaagagtgggcagatatgggaagcctgcttaccaccctgggccatgttgatgtccacgcccagctgctaccaagggccatatctgggtccctggtcctacagtaatcagggtctgtgttgatgtccatggctccggttgccatcaagtgccatgctgatttcagtggtctgagccaccacctggggccatgtttggtttcaggggccaatgctgccactgagaccctcccaatctgggacgccttcactgaacctggggctatggtgacaaccagacccaggctgctgccaagtaccatttctgggtccatggtcctaccacagccaggttgatgtccatgtcccatgtttccaccaaaggccacatgaagcctggggtctgggccacaaagtgtggccttgatggtatctaggggccatgctactgccagagccatcctgacctgagtggccagggctaacatccagagctagaatgtcaaccaggctgagctgcttccttagaccatgtctgggtccatggccgagctgcagctgggatctgtgttgaagtctggtggccccccattgcccctaggacccacacataggcccaggatctgggccagagactatatcttggtttgagtctgtggccatgccacaacaggggccatacaggtctgtgctgccccctgggcccacttctgccgaaggccatgtctgggtccatagccctatagctgctagggtccagattgactcatgtgggctcttgttgccatgaggatgcccagggtcagatcagccacctgagttcaggttggtgtctgagggaatgcaagcagctactaaatgtcatggtgatgtctgagccagagctgcagctgaggtccacgctagggtctgtgaccctgtggcagccagggtcggtgctgatattcaaggtccctgttaccatggaagccatttggtctctgagggtcatactgctgttggggcttatgctgacctgagtggcctgcactgccacctggggcagtggtgacatccagacccaactgctgctgaggactaggcccttggccctagcgtggctggcgtttgttctgaagttcaagttccacattgccactaaaggtcacatagaagcccagggttggggctgctacctgagaccttggtgttcagcggccatgcagctgccagaaccttcccaacctgagtggccattgcttctacccagacccaggatgttgtccagcccaagctgctgccgagggccatgtctgggtctgtgatccagctgtagcttgggtctgtggcctgtgtcctcaggaagccttaggaaccatgcaagatgaaatcagagggccatgctgagccggcctcatccttcactggccctgggaaagctggccttgcatctcactgaacatgacagcaagagagctggcccttgcactcaggagggagggctgccacccctcaccacaggccaggatgaaccaaccctgaaggcatgcatcttctcagatgggggaccccagtggcctggactgaccagctcagctaccacccagtcccacaacctggccttgagttggcacaccctagcatttaccccatctactaggacctgctggagctcaagaagggactgatcctgtggaacaatacccacaggatctccaagactcagtgtagccacaggatatcccagaggagttctggtgaagatccagtgatggtggtgagccagaaaccagaggccttgaaccagaccagtgactcaatgcaatgagcatttgctagtaaagctgattgaacaaaagggtatactatgtgatacacggaggcccccaatgcctccagatgaatgaaaaggtattggagaggtaggatagaaggaagagcaaagaggctgttgttttttgtttgtgtgtttgttttggggtttgttgttgttcttgtttccatttgtttgcttactttgtttcgtgggggagatgcaggcgtggtgaggggaggatatggggcagggggggaccaggaggtgagtggaattgggatacatgatgtgaaactcccaaagaatcaatagacaaatttaaaagccaaggctgttacacagagaaagcctgtcctcagggagaaaaacatctttcaaaaggtaacaacaataaaaataatttaggattgagaatcctgtgtgtgacatagggatctcaaaattacatacagatacatggaattatttttttaaattaatttatttacctttattttttgtgcattggtgtgaaagtgtcagatcccctggaactggagtcacagacagttgtgagctgccaagtaggtgctgggaattgaacccaggtcctctggaagaacagccagtgctcttaactgctgaaccccatgcaattggtttttttaatcacaacaattttgcagatggaagctaaacagtggggttctaggtaatgtgactagggagcttaaaaaatcaaaacaaaaatagtgtacatgtcccagctagacctaaaatcaattaactcattaactccaatctgggagtaaaagagtggagtctaccaggcctgtgtattttttatggctcttcaggtgattccagcacacagtcaaggctggactcctcttcatggtaaaacttgttccctgaccttttaagtcagtcttgcaaatctgtgtggatggtcactctttatttctaccaataacttcttcaaagcaggtatctgagatctcaacaactgcagagattcacaaatacacacagacaaaatacatgcacacgcatttttatttatttaacttaggccctaattattagtacatacatcagaaaaactgagtgccttgacacttgcataccctctccaaatatttttttaaaaaaaacctgaactctaaaaaagcacacatcaaatatatttaagtcataatataacacacacacattcccacacacaattcaatcaccttcaggaaccattacccggtaataggtttcataggtaagatctcactgtacaaaaaaagaagaaagaaaaaaaaaaaacagaaatccacatctgaaaaaacccaaacaaacaaatcagcagactttgattaagacacgtgcccctcctgtgagcactgacagtcggcatggtttgtcacggcactttgaggtagcatgttctgtaaagaaacacaagtcacggagacacaaggtacaggcatcagcctcgacccttcatgtaggaagatgagcttgtccgtgttcactgctaatgccggcccggacatgcctggctgttcattcacccacctccgtgctgtgcagcagcactccaatgcatcttccttatctgcaaggccagcctcctttgccaaatgtgtccccaccggctggagagaaacccagtagaaggggcactgagcatcacggtgtcccttcttattgtgtttgacaactacattcactaggagaggctcctctttaaggctacaaagaggtccatgttgtctccatgattctaagactcaaaaaggtgtcttcttcctccccttggatacaatatttatggagaagcagtaagctctctgggattttctgataggatgatgagcagagacgcttaaaagaaaaaaaacccacacaccaaaacaacaaaacacaggtacaagatcaaaaccaaggacaggtttcattttgcaagttaatttgggggtgggggtgtgttttagacacggtttctctatgtagccagggctgtcctgtaactcactatgtagaccaggctggcggtttgcctctggaaagctgggagtgaaggcatgaggcaccacacctggctccctttggcaagttaaaaagacaagggtttacagtttgggaagtaagtggcttacttctttgaaagaaaagtccattcaggtctgcattttacatacaaatatacaatcaagagaggttaaggattaaagctgcaaaaggcccaccaacttcagacctgggggcaagtaatggtttgttttttttgctcaatggtcacagatcaaaaagatttcaaaagccctttgttcgaatagggttccctctttgaaaggtgaaccctcaaaaataatcaatacacaagtgaataaaaaagtacatgtccaagcaagaagggcatgttctgggcctgagttgccactttaaacggtatctggcatcacacaaaacctcacagcctgcccagaaatgagccttgggcatcactgatcaagtcgactgcataaggagcattagacttcaagtattgaggtgctacagcagccactcggaagccctcccgcaccccactctataaaaagggaagcactgctgactggcttatgaatttgaggggtaagaaaattgctctccgaactcagcagcctcaggaagacaaagggttcttgaccatctgggcaatgccaaggtgctcgagctggcactcgagcgattgctttgagttctttctctctcccttttgtatcaaacaggaaaatggttccattgggttaacagtgtcatcttaaaatgccataaattaaataagttagttcacatttttttttctttcccagcacttaaattacagtcagtctctaaagcactttcaaagcctgctgtaacagttcgaggtctcttctgtggacactgctggccctggggcacccgtagtcctccatctgcaaagggaggtactgctcaagcacccccaggccctgctcagcaggactggtgaacagcttagtccatgatggtctaaagtttccgctgaatcccaaaaatacaatactgcctataaagagagagagagaaaaatgtagtgtatagctaccagttccagcaagataatgagggaggcgagtcagagtggagcatgtgctggcgcatacacacacttgtacacaagcacacacatacacacacatgcacacacatatgtattgataaaaacacccgcacttccttacatcagcaagcaattcttgccacccagatgatacgccataacccaacacacttcctctgacacagttctttatgaagaaattatttcaaggatgctccctccaggaagagctcatgaaaacagcataacaggggctgaagagatagctcagaggttaagagcactgactgctcttctataggacctgagttcaattcccagcaaccacatggtggctcacaaccatccattatgagacctggtgccctcttctggtgtgcagatatacatggaagcagaatgttgtatacataataaaaaagaaaagaaaacagcctagcagataaacaccaccttaaaagtattttcactgctgcatcataaggacatcataggacactgcaaatacaaacctttgctatacagatgtgctggtttgaccaatcccagaagtactaatgaatcagagatattcatctgttttatttcccctctcgtgctcaacagaacgattgacctgcgggcagagttagacaatcagaaccaatgccagtcattcaacacggatttactgaagatctttctggactgagagtcatggaggaacactggacaaaagcaaatttagaagggaaaacatgcctgatgcttttcatccccgctgacacaagtcccaactccctgctgcaaagggaacttcttatggttttaggagggtcgtaacacggggaaacacaaaggtatggaaaccaagagtcatgtaggcacaggggcaaactggaacccagcctttcaaggactggtctacccagagagggtgccttgggtttctctctgtcattgcctctttattgtgaatgggtaaacacaaacttaaaacataaagattagggttagagtgcagatcaatggtgcggagctcatctagcatagtgaggccctagactcactccccagtactacatataacagcaacaaacaaaaacaaacatgagctgttctctgtggtttgaaaaagattttttttttaaatttgtttaattgacatctttagggctactgaggtggcttggcagttgagagcagttgctgttccactggaggactgaggtttttgattcccagcacctacaagaaagctcacaaccacccgtaactccagctctactagatctgatgtcttcttctggtctctgcaggctcaaggcacatacatacacataaaaatagtaaaaaaaaattttaaaagtcatcttcaatgtacagtaaaaatcaacacaatattcagagctgtttgtggattcttgcttctcttcctggtatagttgctatggcttcatactttattgtagtatctgaccaataagagcttttattggtataatttcttagagagagaaagagagcaagagagagagggggggagggagagagctagcttaccactgtaataccagctgccaagtacaatagaaaaaacagctgtttgctcccatgtacagaaagtgcgctacttgtataatttaatttagtgaggggcatcttgtaatattaatttccattcagaaagagtcccttctttaaactctggctgcaactcctttagcaatgcagatagtcttaatttggactttgacaagtgcttacgaccagaactatggagtaggctcttggttgtagttctcctaaagcagtagtgattggattcagaattattacagaggatggccacagaagtcctgcagatctgaacttcaacagcatggaattatcaggccagtctggggagatccttaccagatgtatgcaagcaagcacatgcacacacacaggcagtccacccacaagctctcagaaagtcactgtcagttgcaccttaacttcattctgaagccctggctgactggaccttcctaagtagaccaggttggcctcaaccttctagtgatcctcctgcctctgcttccagaacaccaagactaccactactactggcccctgccctataacttcttgacactgtattaaaatgcaatacacacatgtagcaatcctagggttcaatgcataagcctctgaaaactaaacacagtaatagaaccagcaggcagctggagaaatagctcactataaaaagtttctccttaggtagccgttttaaatcttcagtgtgtagggtacctggcaaaacaagtatttacatgttttctactatttggtgagatttgtatcctgagttgtttgaggaaaagtgagaatatgggtttttaaacactgagaaaaatctttaaatactgaaacctcagaaaggaatcctctaaaattatcctaacaataagatggtcctatagctagctgatcctcttatccacaggctctgcaaacctgataacctgagttcgattcccagaacacaagtggtggaatgagaagaaccgcaagatattctcggatcactgtatgtgcaccttggcatgcatgggcaaagggaacagaatgaaaaattggggaggggaaatctgcatgtatactggatacaaacacacttcatcccttatcactgttcctaaataatacaatataacaagtatttacatggcatttactcgggcctcaccattattcagagagaggatttaaggcatacagaaggactatgaaggttatatgcaaatattacaccatcttaaataagggaaacagatatctgcagggggaactaaaaccaaacttctgtggatactgaaggaagactactgaaggaatgacctcctccacacataccataccttacacacacacacacacacacacacagagagagagagagagagagagagagagagagagagagagagagagagagagagagagagagcatgaacacatgcaaacaaatgtcatgccaaaatgatccaaagactttatgggacttattgggagctagttctgcaggctacaagaacatataccttcagatcaatggaaatgactagaagaccaggtgagtctcactctacaggaaacttatgctctttcagtaaatggctgcacttaatatctaccacagaacagcaaggatcttgaattcgtctccctctcctcacaccagtctggtcaatccagaaaatgaaatgttttccatggcctctttttctcagagataaatgacaacagaaatcagaccctgctcttaaaaaagagcagggacacacaaccatttaaaaattaagttattctttcccagataccaagtgacctgggcgatggtgtcctgaatcccagtcactgtacaaagctttgtgagactccatcagtgggagcaacagccactaaagaaaactacctcacagagcctgaaatgctcatggagtaaaccgctcagaagtaagcatggaagtgaggagtcatgtcttaaggtagcttttctctggtgcagggcaagcttgacctaccttggagggatgctagcctttaaatactcttccatctgactgacatctgcagcaaggaacatctttttttccgtcaaccggaaaggaacactgcaggcatccacaacaagaatgagaacgcctgcactccggaaggtgaagtctgtaccattgacctgagaatacaaaaatatcttatgctgtcatctccatttcagaaacatccctaggatacttgagctttctctagctccttctaagcccaggattcaaaatctatcatgtttggtttattgtctgaaatgtctacaatggtacccatactcctccagatttcagtttcttcaactgtaggtcatgatcccaatgcagagtcccatgactgaaaggtttctggatgcacaaacaaaaatccattcaaaaagaaacacacaatgcacctggggtatttctggctgtgctcagtcatgttgcatcttgtgactttactggagccttgattctgaacacacaacatgtgtactttatactgtgtatattttcattcacccagtcacaggaaatgatgcttcaaacacctcagctgaatcaaggtcactgcatacgaccatcggcagtatgtcaaatgcacagttttctgctcaggtaggaaaataacggttgaataatggaaaacaaacaactttaatattttcctgccatcattcctctctgtataagcatcaacttgctgtgtctttggattggatcatgtttagaatgcttagttttaaaaccttgtttgagatgctgacttgtgtttgatttaatttttttttaaatcatcaaataaaatttggcctgggattaggacagaattcccaacaatttctaaaatgaccctaaagactcttttgcccattttgtaccacgtgcttacgtgaggtggtattctcagcattgatgactctcacatcaaaatatggataaagtccaaaaaaacactgaagatgttctatatcttaaactatcagagatgcagccaaagtttaattctttttgtgaaaatgaacagacccatctatctcactatttaattcactttaatctttgacagtactcagtaaaattatgtgcagaccaaagaattgttttgaaacatgcttcttttagggtcttttttgtatactgttttacatatttatatgcccaagtttttacaaaaaattcttgggcaaaagaaagccatgaatgggaaaacgtcaagaggtcctgctagagtctgccctgggaaatcactgctgtccatataacacactctaagcaagataaggcagcctccattcagctgtgatggtgattctgaagtgttcagtccttagccatgaacactgtgccatcaccaaggctagggctggtgcccatcacccataatcctttggcatctaggcccggaataccaaagcctccgaatgcctcctttctccttcaaatacagctcttctctgacatcaaaatggcaaagtgggacttttactggcacttaagctatgaagtattgaagcaaaattgaatgagggaacagaggaaacatgggaagggaaaaagacaccttaatcctggaacctggctgagagtcaagacactgcaagacaactgataaataaaaattgcccactaagatagcacatgttttcctaaagatgtcttaaagttagagaaaacaagccacatagggtcagaatatgtgtgactgtcagttttttaccatgttagcaccctagcaaccctaaaccccaaaacgcatctcacaaaacaaccttacgggttcatttacaaaaagaatcagaatgccaacttgtatgtttccttccacgtttatgtttaatctctgaacactgctgcaaatgatgatttttgagcaagttggcaagccacagaactgaaaaaaattaagcccagctctcttatgaagcctacactgtcttagactgtgccctctccttttcagtttgttaaccctgccctccatcacgtgtagaattctttggtaaggattaggagacagggtcttgttgaaggaagtgtgtcactgggggtgggcttgaggttttaaaagcctatgccattaatagttagctctccgtccctccctctctctctccctctctcgtccttcctgaaatattgtgtctaacccatgacttagctcataagaactcaaaataatttgtttagctatgtgtaagttgcttgaactcaggaaatagttcttctaattcctgatgtaatttttttcttttaattacattctatttgtgtatgtgtgtgtgtgtatgggggggtgtactatggggtgaatatggaggtcaaagaataatttacaggagtcagtttcttccttctgctatgtggggtcccagggattgaactcaggtatttaggattcttagcaattgcatttagccactgagccatcttgtctacccattgtgaatcttattgagaaaaaagaaaatggacatgatccactatttactaatatcagaatatttaaatttcatgtaagacaagaaattccataatgattcccagaaatgcaaagtgtgcttacaaaaagcaccacccctttgcaaaaacaaacaaacacaaggagggggaagaaactttcagaaaggactaacatcatgccaaagcctcacaagtggatcacgatgtgaaagtcctggacataaatgtgccatcaggagttctgcagcttggtaagaaacagtggaaatcagctcagtgttggtgacagcagcccatgaggatatacaccatacaactgggcacaaggctaggtaagatggcaaagttcatgccacatgtatctttcttccttaaaaaaaaaaaaaatggggcaggtgtaaacctaactttgtccccacacacttggaattgaaattatcaagtcattgctttaacaaaatgaattcctgcggagaccacaggaaactgagagggatgctggataccggctagcaaagagctccttacacagagaccccctgactttggacaaaccacatctgagtcctagttcctaaccgggctaggagcccaaattctagtgctgaccctgtgactcccatctactccactgatgctctcaggaaagacagtaactctgtctttgctctcttctctacctttcttaaaagagacaggtagccttcaaagaaaaggccaaaggaatttagaagctatcattccccatatcgtaaagaacctggaagtttattttaattcacaaaacaaggttaaacatggttttctccatatttagtgaacatgagaattcttctctaactaaaggtgcctttcctttaatgaaaagtcatctaaacacatttttaacattagcctaagactggttctcaaccctcctaatgctgtgcatttaatacaattcctcatgttgtggtgacccccaatcataaaattactctgttgcttcttcataactctaattttgctactgttatgaattgtaatgtaaatatctgatgtgtgaccccaaaagggtcactacccacaggatgagaaccactggcctaagagtaatcaataaataatccactggaaaaaaataactctaaaccacaactgtttgggtggcatttatacctcagctgcattcctgccaccagtacatcaaatgggatgacaaacccaagactggtcccaggattgaagatcaaagcaagaagccacagcaattctgcagttggctaaaggaagtgatgctgtggttggatatctgtgctcctacaaattcatagtttgagattctaatccccaaagtgatggtattaggaggtagagcctttgaggaatgagggaagcctttgtgaatgagacttagaagctaagcctgagagatgacaggacacacacaggaaggaaatgcaagatgagccaggaaaatggccctccccatagtactttactacagtctccatcccggatttcccagctctaaaactgtcagcagtaagctctattgcttctaagctacttagcctatggcattttattacagcaggcccacaagactgaggcaatgccaggctgtacttacagaaataacagatggatctccacgctgcgtttctgctttactgggtgactggaattgtacagggaggtagctcttgtgggggtcactgctaaacaccatctagacaagaacacattgcatctttgaaggccactgtatcgaaatcccacaggtccctcaattatcccaagtggttatttctttatctcaactttttaagccgacttcatgacctggaattctagctcatatatttcatacaggcagtgtatgcttcttggttcctggaacaatcacagtttcaaagaagtgtaattttgttaatgaaatcagtagggctgggggatctcgctcagtggcacatcacatgctcagcatacactcccacacacaatcaagccaataaaattaactcagtaatatgcactaaatgcaaatatttataacatttcacggaaaaacaggcacacatcttttaaaaatgtgatttctttttaatttttatgtatttatgtcagtgtgtgtgtttatgtgagtatatacttgtatacaggtgtccatggaggctgggagggggcatcagatcccctggagctggactaacagatcgctgtgaaccgaactaccctacatcagtactaggatccaaactcctatattctgcaagagcagcaaatgctattaacagttgagccacctttttggtcttggaacacattttcttaaaagatcatttttagatcaattatcctgaactggagttcatcaatctaggaccaaggaaagtctctaacataaggagggctatactgtttaccaaattctagtgtgctgaacagggccaggcctcagcccctttccagtgtctgcaaattgcttcataaacagagccagtcaatacatagaggcccccatttcccccaagagccagggtggtcctccactttcgacaggtacttcccattctttccctcctctctgctgtcttagatgctgtccatcccatcttctccaatttactctaatttccctaaagtctacctcccctgatcagtgtgtctcattcaccaactcccaagcatacactccttataaatcatcatcaacaatttcattgaagaataatcattattataccaaacaacatttggaagttgagtattttttttttgagtcttagtttggggcagagctgtgggaatctttctagttatttctaatacgcatgtgtttggctctaagatacaatacaaacactcttctcaaatttccaaataaacatgacgctcccaaacacttcaaatgctttgcagctgcaccgacaatcactgccaatcttcctttttactttgtgagatgggttttctctattgtagaccaggctgacctcaaacttgcaatcctcttgcctctgcctcaagtacttgagattataggcatatatcatcacacctggcatcaacatttttaatgaattctttgagatgtctgtggcatagcaactaagaatgctaaaggtaggagaggaaacccaggacaccagtgataatcaagtcactttgaaaagctatcaagtttatttaataatgaaggacattctgaactagagcattcaatgtctaccccaatattacctaaaagtgaggctggtagagtatgtatttagaatgttcgaggccctacattctgagcaaatcatggaaaagaaaaaaaaatttacatgagccaggcaagtgggtttctgttttccatgaatgggagagcagagatcattaacgaatgtgagtgaggtagtgacagtgaattgccattaaaaacctgcaagctaggtgtggtgactgagacaggagaacttaaatttcaaagtcagcttggactcaaaaaaatcaaaacaaataaaaacaaacaagggaagggagtgcatagtaaatactggaggggagaataaggcagagggtacagtggatgatggggaaggataagggaatgggatacagagtagatgaggggggaacaaaagcaaaggtacagagtggatgatggggaggacaagggatggggtacagagtggatgatgggagaggctgatggatgggagatgtccttctgtatgctgtgaatatatgttttacttattggttgatgaataattgacaggcaggatttagtcaggcaggcatccaaatggataggcaaaggtagtaggtggagttagggagatgcagaggaagaaagaggcccaggcatcactggtaagccaagaccatgtggagctatacagattaatagaaataggttaataattaagagagagctagccaataagaagcctgagccataggccaaacagtttgtaattaatataagtctctgtgtgtttatttgggactaaacggctgtgggaccaggcaggacacaaacttctatctataagaagagaacaaaggaagggacataagggaagggacatggagtggatgatggggaggatgaggaaggggacagggtggatgatgatggggaggatgaggaaggggacagggtggatgatgatggggaggacgaggaaggggacagggtggatgatgatggggaggatgaggaaggggacagagtggatgatggggaggatgaggaagggacagggtggatgatgatggggaggatgaggaaggggacagagtggatgatgatggggaggatgaggaaggggacagggtggatgatgatggggaggatgaggaaggggacagggtggatgatgatggggaggatgaggaaggggacagggtggatgatgatggggaggatgaggaaggggacagggtggatgatgatggggaggatgaggaaggggacagggtggatgatgatggggaggatgaggaaggggacagggtggatgatgatggggaggatgaggaagggggtagagtggatgatgatggggagtacaaggaagggaatgtagagtgaatgacaggagggagaggaagacaacactagttccccctcatatgtagaacctggatttaaatataaatacgtgcatgacaggagagcaaagggaactacaagaagaaagaaagaccataaggagggggaaagggaggtgacagacatgggagtagatgagaacaaagaataatgatacataggattgaaaatgtcctatagagaccactgttttcattgctcaacaagaattaatgaaatcatggacagggcagagaaaacaaagttcatgttatgagaagcatagagttatcatcctttcttttcccagtgttactaatggtgagaaacaggggtgggatttatgctgtggaagaagaaatctggttttttcaaatcacctacagaaagacctaagcatttaagcatttccttcatttacagtcagatgctttttcttttctttctttctcttttttttggtttggttttggtttgtggcaaatcatgctctttaagactgttgacttgatgtgggcagcatcagcatcatctctggccgtgggaggcttctgggctcagtctggagcactaactcagtagcactgcagtagaacaggaattcccagtgacagacaggttcccaggagatgctggcccaggaacgcaccgtcagaaccatcttttctttcatttatgtgtttcttggaagattaagtatgtcaagtggtcattagttctgtgtttctctttcacttggaactgctctgactttcttggaaccccatctgtgtgcacttgtagcaatttacttccactgccatgttttcttcaagataactgggatatattctaagctagagtgtatcaagagaagtatttttacttctcaccaaagtcagtctgtgtttacaattacaaggaaaatataatagcatctgcttcaaaagagtgacctttaaaaagggaaacaagttttgacatgagtcgaaatttcacactactaatataacaaaagaattatggggcatggtggcatatacctataatcccagaattcaaaaggtaagtcatgatgatcaggagttcaaggtcatcccaagctgttaacaaattcaaagctatcctttgattgatgagatcatgtctcaaaaaacattaaacacatacatacataaattaaacaatttaatagcacttttagtcaaataaacccaatagtaatattggaatagaatcctaaacctaggaaacaattttaaccaacacaataacctttaattttaaatatgaaactcataatcaaagtaaatcaatctatcaagaaaaagacacttttgccataaatggggactgttttgcttcttaagagcaacacattctagactaaatcaaaattcaagaggtatcagtatgtatctataaagttgcacgatataaacttcaaagtcaagtgctccaactgccaagggaaaaaactctgacttccctccaaagactccctcctgttccctgcttacctgatgggtgccacagccttgacagagtcccgtgagcatggctggcatgcgcttgactgctgagggctttttgtaatactgtgggtacgctttggccatgcagttactgatgtctttggagtctgttgctgcctgaatcttgactctttcacatccctgagatgaacagtaactgtgaccatctctgtggctatgggctctgagatacagaaacaataacctgtaaaataaaaaccaagccaattgatgttagttcctctcagaagcataaaatttctcaacttgattcatggccaaggggatatttctccaataaagaagcttttccttaaaagaaaaataaattgcaatgctaataaaatgtttcactttcctccttatccccctagtgtctcaggtcactgccttagggagcactgtgatgctttgattcagttgtcatgaaagacatcaaagttgatttctggtttaaattagttcaaggggtcatctgagaggaaggaatttagcttgcctcaaaacttgaaaattatatttatagagtttagaaatgggacattaaatatcaactattccttttgttgtcactgctcataaatcattgtggaaaaagggataataaagtagcaactgtaacttgtttaactaaggccaagacaatcaaaggcttgtgatgcttcctaagagcacatgggcctggggtccatcctcctcaactgagccaaaaccaggctgggggaacaagtttcaccagttctaaattatagtctccctaccaagatgaatgggaaatccaacttctaagaaatgcttcattatatgaaaacctagtgttcccaaaccaaaggagtcaagattcaaaggacttgatacaaagtgactgattaatgaagagttcacattttaagatgagctcaatgggcaatgcaaagttacaactgaaaggtaagcatacaatcaaaatagactgtacaaaatcctcaaagaataaatagaaacagtataataaattgtttttaaaaggtcagagccaagcatggtggtgcatgcctttaactccagcactcagaaggcagggcaggtagatggagctctgtgagttcaaagtcagccaggtctacacagagagtttcaggccagccagagtttataatgaggccttgtctttctccccacaaaagtaagaaaattggtgactgtctcaacatctagtaattgtagcacaaatacttaaaaaaataacagaggcctaaatgggcaagagccttttaatatataatttaaaatccagaagctggattttttttttaagaaacctaaccagaaataatgtccaatctttgtacatgcataatcactaaattgtggccactggagtgtccttacaaagttggtcattgcttttatttttgtgaaaattcaactaagaatgtggaaattctgtcgtcaacaaaataaaggtccagttagactagttatattaaactagagattgaaatttggagactccaaatcttaccgcacaggctgctgggagtactagagggcaaatgagttgctttgtaaacagaggttaaccagatgattaacaaatgagccccaactttcagcccccaggcaactctgctcccatttcttcccactctgaactttgtgtctttcccaaacatgccatgccaatgttagtccatgcctccatgcatgtgcgtaccgtttcctctacctgagacttctcacccagctgtttgtatcgcccccccagttgctcaagaattagctagtgtggcaccctttgcaggatgtcacgtaccctcagctaacatgtgagttacccattgaggcacattaactacactgctgttggactcctagcatttaagctttttactctctaataacttgcttcggtggccaaattcactgcagagatgaatcctatttgcattggtatctctatacctagatggtagacagtcagcttatggatggcattggaaggagcatgctacttgctggagagaagaggagatcaagcctaccatcacccacaggctgagagactgtaactggacaaaagcagacaaagccaccaggaccccaggagagcaggataagaattaaaaagtggaaagacgcagcctagagaaagttggaagcaaatatgccatggttacacagtgatgtttaaaaactcgtggtgagcttgagaactaaccttaagttagaagagggaaaagagctttcagtgaaatataaacaactattataaataactttgataaataactatcacagagctattatggaagaacaaattaccttaattttcaattgtgtctactgatggctcttgacaatgataatctctttccctaaattgtcttaataagtaaacagcaaatatctctacttgagtcccactgccaactataattatgcatcatctgagctgtgctccaagcccctaatagtgacgagcacaggtgcccatgccagctgctgtgctaaagatccgtcacatcctgtccgttcttagctatgctagagaagcatcaatttcatccttaaagaaaaacaacattagttctcattcactgctcccatgaattaccctgtgccagagtcaaaatagaattttctcgaagacggcttcttctgtagctcttccatcgattgtgcgggctcatactcttcaattctggataaagagccactctgccgctgcaggaagccgaaggtaacctgaaagcttgtgttggatgggtaacagaggccaactcggatccagtcatccctttgaggagagacagaaaaaaaaattcatacttgagttagtctcttttgaatgctgcagcataaggaatgaaaagtgacttctctctgccttttgagtcctgagccccaaatactgtgtctgtgtgtgtgtgtgtatgtgtgtacatatacatatatatatatatatttcatatatatatatatatttcatatgtatatatgaaatatgatctaccaagaaatataaaaaacaaaacttggtttcaggagaagccagaatgtatttgtgaattaaagttaacatattcttcaagttccagttgggtatgggtccactaacatgaaactaccaacaccctgacatcctggttttctcatggcatgagagaaatgaaggtgcatgccatttatcccagctaccaaactactacaatggtcttcatgatgattcttaaatataagattatttctttaaaaagaaaaattaaatattttctcccttttggcattttcttttgtgacatttttattgtggtgagataaaatacactctaaaaaatttccattttacacattttcaattgtacggctcagtgcacaaggtccaccacccctggccttgccataacctttctctatctaaagcgccttaagatagagcaagaatttaacactgttcatacattgtaccaagtgatctcattaaggagaaaatacgaatgcagaccaaaagctttaaaagcaaggctgtcccatggggtgttatttctaacagcagaggtgggtagaaaccctcaatgttcatgactatttaaacaggcacagtccatccacaactcagaaaaacctgaggtaatgggaaagagcaccataatgtttatctgcctcactgtagttaggattaaggataacctcaattttctttttggtttgtctgtattttccttatgtttaataagtgcagtgtttaaagtgttcctttcagaagtacctctctgtaattacactaaatccagaaaaattattcacttcttcctcttgcctctgcccaccatgtaatttttatgaacttttagctaattaggcaagggaaaaatgactttatttcaagttcgtgttgacttttgaaacttccaggctcattcctttttccctttaaaagtcttatttgtccagaatcggatgaaaagtttgaatgtgtactttccagagcctgtctatcatttcactgcaatatcttacctcaaacccatgatccaactcaatataagtttccagaacactgattcccttcccatcccccctaccattcttttctcattggcttctttgcaactcactggcaataacaggctgggcctgaagaaatcttaccaggaacacaatatgaactagggactgaaggtggagagatggagcaacaagctgctgcaaggatctgggcaaagatgatggtggcctatattcagctgtacactatgaagactggactggaaatatctgaatggcattaaggagccagaactaagagttcactagcaatgggatggaaagggaagggtcagcatagggaatgagttgggcattggggcttggcagaaggacacaggtaagcagcaaggttagagaaggaaatgatggtccattcgcagcacccatcaatctcacactaagggcatccaccatcatgagcacccagccttggaagtgagctacttagactcaaactcccaatcctctgtttacctcgactcttgttaagcaaagccaacaactccaagcttcatgaccaagctaatcaattttcaggcatagatttgagtaactgcatggaatcccaagaggttggccacaacataattctagattattttaccccatggtttccacataatcagattcaactaacaaaatgaaaattgaaaatatgcagaaaaacaaatcaaaccaacataattgttctgaaaatataaacttttcccctgccattgtccttaaacaatagtgtagcaactgcttacagtgctttaacactgaaagtaatctactgatgatcaaaaaacacaggacaatgtatgcatgtggattacatgcaaatatcatgccatttcatataaggatgtgaacatctatgaagtttaatatttgcaaggtttcctaaaaaccagctccccaaagactatcactctcccttccttctagtttaaacttctatccttcctttgatattccctatattccaagtctccaaagctaccattctgagctgagcaggccctttctcaacactgggttttttaaggagattgacagttacagactatcactacctctctgtatcctggctctactctcctgagcagagtgctgaattagtattcccatctatgtccactaaaaaaggcttggaagatgatgatgatgaggaggaggaggaggaggaggaggaagaggaagaagaagaggaggaggaaaagggagaggaggaggagaaagaggagcaaagagaggaagaaacagacatgtatttacttgatattttccccatctctctaatgtgagctcattcatttttatatcaactgacatacagtaaatgaataaagtagtgaaaattacagccttggaataaatgtgacactgtgagaatagacaactggtcagttgagacagtgtgacgagacatagttatgaaaatctctcttacattctacaattctaagaaattgagttttattctatttatttatttatttgccactaaaagtaacctttatttaaagagaggaaaaataaaacaagatgtccatcccttggttcccttccctccccattccagctgttcttcagtcctctaggattgaaccctggctagggccatgtagcaggacagcccctcaaatgaagtccacaacactggagtggggtgggggacatcttttcagtgcaagagttgtagaaagtctcaatatcgtcttctgtcaccatgttaaaagccacacctttacagtcaaataccaccatgaccaattctgtggatatagtttgccctgtcagtaggattgataacttctggcaatggagaccagtggtaattaatacttttctagaaccagactggaactctctcatggtcacgtctcattccttttggtccgtatctctatgcatggcaaaaacagtgaaatcccaggcatgcatcttcttagtgagccaagccacaccttcctgctggtattgatgaagattactgcctgggtgacagccagtgtatcatacaagacacagtgtgtcaagcttccactcctcttgttccacactgatgtacattggcagataacctccagggtcaattcttctttcttgacaagaatctgaatgggctctctcattgaacttcttggtgacctcgaggacatcagaaggcagtgcagccaacaacaaaaatacccggtactgttgagcttttggaatatatcatagataaagtccttgagcccatggcttaacatttcatctgccttacacagtgcaaacctcttgatatatttgggggacaggttatctccagttaagtgtatcaaatacctggctagggtactcacaatgattttggggaacttccttctacagcttctgtacctaagcatgttcattagtgccccccaaacaggcaacagaagaggcatccacacagtctcctagtgccataactaagttttgtatctgctgagccaattcatgagtgaatgccaggaccaaaaaaagcagtgattggcctttagaggtgctgaagaattgatatggcaaattcaattgttttcccaatcccagagtgggcttgagcaatcgcatcataacccccttgacacaaggaagaatggctccctgctgggtggcaaaggatgtctcaaaaccagaggcataaataccatagagaaggtcttctgagagattcatgtcatcaaatctcattccagttactctcgatgatgtcttcaggctccatcctctcagggttattgtctctggaccaagaatcctgactcacagatatgatccttagtaagactggaattttgctgaaccttacagccaagttaagaagactccttgaggccacttaagactgaagactgctaccccactgtgtcctcagcctgtctgattaacctgcctttacgaaaacactgtaccaatcaatcgtacttgacttggatttcctgtgtaatcaacttttacaaactaagctgtaattttaagctatgtactcttccatgttcctgacccaacgtatattatggtaacaaatgctgaatatagcaaataggatgaaagcaaccttattaaacaaatatccaccacagatgctggaagccacatggatacaggctgagaagattgtttgcggtgatgcttgcagtactagttgttatctgggagagctgggctcagcgagacaataaagctttattccttgtgaaactctgtttaagatttctctaaagtgtcctcactcctttgccaggtgatgctttctatactgttcaatagtgtgaacccctttgttaaagacacaaatgcagacactcagggatagggacagacaaacagcactcaggcaggaagattcgactcatgcaatgggcagactagagaggaggaatgaagaggaagaagtggagaatccaaatctgggcttggtaaacctactggaaggaaaggtgctttgatttctttccctcagagaaacattaatacattctggggactcggggtttattattgatgcacttaataaacttaataatgtttattattgacacaagacaaaaacagaaggacacttgaaggtaggagtgggaaaatcctggtattcatgccccaacattccttccttttgtccgaaaagccattaccaaactaatcatgtcactatcttttgtcctgtctatgcttggactcaaaattctctcaatattgtcagctgttatgatccataccataatcctagcacttggaaaaccaaggcaggaggattgtcacaatttcaaggccagtatggactacatagcaaggctgtgtcagttctcttccccacttggggtggggtggagggatgaaagaagagaaaagaaagcaagccagccttttagtttaactttccacatgcttactcagaaaaccacataaaactgggaccagctttgggaaactgcaatgctcagcagatgctattaaaacctatcttttgagtagatggtattgctttgagaagagtttttgctaacgtactggaggtcctggattgaatcccaactacctcagataacaacaaaacaaaacaaagcatactaacaaaagcatgcttatgatgcagcctgcttgagctagacatggataaaaccagaccctcactgtgagcaagcttttctgtacacaatacctaacaacagagaaaaagaaattgtcttaaaagccaaatcggtcgtataataccttgcacaatcacaattccatcctcacagcctactccacaagagtacagtgcatgcaacagcttcgtgttatgtcattcttttttctactgtgactgcctgctcaactgtttgcaatgacagaaatagaaacattacttgttgaagttcacgaggtacaagaaagtgatgcgtggcgccggaccgttccagtgaatggtgtagcccttctccagcatgacaacgggctggtactggggggaaatggccctctggttgataccccgaagcaccattgggtgggatgggtattcatctcgtgtgatgatcatgctaagattcggagtgttccatgtctgaacatacacctttaagaaaaagttaagaatagaaaggaagtgaataaaagattaaacagttccaagaacttatccagcacacagcaagggtctgtacattgaaaagagattccatgataagtgccagcccaaatacgcagtggccaagtggcctaagccatgcttacgatgcagactgcttaagctagacatggctaaaaccagactctcgttctgccagccaagatcatcaattccagcatcacaggctagcttattcatcaggatggagaatgtctgtggtttgcacagcttgtcacagaaaccactccatctgaagaacacaaatccaacacaaatcagcaaacacagggaaactgatatgcctccaggcaaatctaagacccccttctgatccatgctgtggtaacttcatatctgagagctctggctttagtcttccatgacctccacttgcccaagaagtcattttccacccatttaaaactaaaagttaaaaagctctctacagcatctggaaaaacatgctaagctcacagaaattggaaagccctgattttttttccagtagcatttgagccacgttccaggccaaacgaaagccttctgccaaggcatcccccgcaggacacgcctcagaacaatttcctaaaataaatcaatatccagcaacacattcttcaggagaacaaaatcatatgcaggatactgacattttacccacaattcactggactcttctataacttggttcacacaggctcctccatttatgttcttggagtcagaatatcttctcaacactcatcccttgggaaaatttagccttgtacaccacttacaaattcagaatagaagcaggaaacataagactagcgattatgttcctttaaatacatttttggggtgtgtgtgtgttcatatgcacatgcttgtgtactcttatatgcatgcaagtgtgtaggcacatgtgtatgagattgtggagactgaaggatgccgtcaggtgtcattgctgctcagaaactatccaccttgttctctaagacaggatcttatgggcatgggccccatcgatcagggttagatgctgctggccagccatcccctgaaatccacctgtctctgtcttcccagcattgggattacaactgtgtaccactttactgtgttatcccagcctttaaataaacagttattacagacatatcatacatgatggattatcatatgaatatgaatttgagagggaaacagactgacagatagacagacataccttctgccttctaccaaaggacaacctgaggtagtatgcataactgtggactcccaatgctaacactgttcttcctgagtgcctcatccttcaagccagtctggaacaggtggaaattcacctcaaaggacttacaagcaactaaagaatagcaattctgaaaagccaggcgtgggggcacatgtctttaatcccaccacttgggaggcagaggcaggcagatctctgagtttgatgccagcctggtctacagaacaagttccaggacagccaggactacccagaaaaaccctgtctctaaaaaaacaaaaagaaaaataaacaaacaaaaagaatgacaattctgtcttgacacctgtgccaaaaatgcacactatattacttgtaaatgaaagcaaacagctacagatttgggcttctgcccaaattgcaaatctccaggaaagaatttctgacctgtggttctcccattctttgagtctcctgggaagcataaatgactcaggccttcctttagctacacagaaataaaatgactacactgcttcctaaggtggaatgattaggttcctatctgaaacagcattacaaatccaaagtcacatggctgactgagtaaatgaatgagaatgtataatatttagttaaaaactggaatttatgaaaaatataccacatacttcacagacataacatcttcattagtgagtattcactattttcagtcaaacagtctggcatggacacacacacacacacacacacacacacacacacacacaagtacacatggttagcaaaaaaattaaataagaaccacagctacaaaaaggacaaaggctccttattttggttttggtttgaatttttgagtatacttggagtctaagtattgatggggacatttaactgtggatctgggcaaatctgaataagaacaaaatgaaagatggggatcacactttaaaccactttctgttcttttttattaactctccatccactcctcatcccctctgaaggacttggtgctctattacctcctcccacccccatctgttcaaaagaatgagaaattcccacaacaaaagaactaaaaaaaaaaaaaaaatacagaggaaatgttgtccagtcttcatccctcttaagccttttgcttgtctacagagaacaatctagacttttttttttttttttaagagtaacattcttttacagtcatttcaaagtcagaagagtaatgaagaattctgctctaagccagctacagaaggccgaggagatgaaaaccacatcaaacctggggcacttggggaagcaccgagcaggagcccacaaatgtatgcacttgtgcttagtgggctgcgagccaaggtcagtggcagggaaaaaccacattaacaaagacaggcatctggtatggaccttcacagtctagtgtgacttacagcaccccttgtcctttgttcttcctccagttcccttctttgtgctcaaatcggctccttcttttattcttttatctcctctaatttttttttttttttgagacacataatgtgctatgtagcccaagctaaccaagaagtagagatctacattcattagccccctgaatactggaatcacagccatgcatcaccactcccagcctagcaatctattattaaatcccccacttttaccaccctaaatatggggataaggattcaattctctccctccaagattctgggaaattgatgcctcagctctgtaagattgtccatcattccaaatcccactgttaaaaccagctttgtgacttacaaccctgctcttcaaatggcagttggcatttcagctgaggccagaccacatgctaaatgtgttccatgaaagcatcctgtcctgtcactctcctcattatgcctggccacagaatatcctttaacggacccacctctcacttcagcaaataacaaaatccagggttcgaatccagtccgcctgacttcagagtctgtgctctctcttaactactcaaactttgcaagtaagcctctcatctgttaaaatatagactagcttaatggtttcaaagaagtattcctccgtttctttgtgctatccctttcatgtctccatagactatcatcatatcattagaatttccctggattccttcttgtccatttattgccaaacctcatttctttccttggaacactacactttctcggtgactcactgatattctttctcaaagtcagatttcacagagagaaggaccctgaaagcaaaggtcatacttggaatgtggcacaaaaaactgaaggtcaagaaacatcagacctaactatctggtatagtactcgcctacagtctccgcccacaggaaggggagacacagccaggaggattgccacaaatccaaagccagacatggggagaccttgcctcggtaaaagaaacatggcttctcatgtccaagctattgcaactctatctgactaagcgcattctcctaccctcccctactgactcacgtctctgatttaactggtttgaaggagcttttggtaaaatgttcctccctaccctcccattgtcacttgctttcctcccctctcctcctaaagactgtgcttgggaaacccccagtcactctgagggagttgtcatcctcccagagggtagcactgccaggagctgcaggcctggaccacctgctgggcctacctgggcataggtcccactgcagaccactgcattccacctagtgacgttgacacagtttggatggcggatcagatagttgtccatccttcccacataggcatccttgtatcctgtcacagagccatcaatgtcatggaaaatggaattcttatcgccgtccagctcacaatcctcaaaccacgggccaggctttccaaagaagacgttcagagagacctggcagcagacaaaactaaaagcatcacaaaaggaggttcctgccacagagtagcaggagtcacagaggtcactggcatcgtcaaccacggtagccagttgatctgagttctacaaagtgacatgcttgtgcaaaaatatttctaaagcatcgtgaagctctactgggaagcattaaactgcaacttcatttttattctctccccccacccccatccacttaaatgataaagctgggagaagagaaagtagaaccaggtatatttacttgaaaactattataaactccacatgtagctgggcatggtggtgcacgcctttatctcagcactggggaggcagaggcaggtgaatctctgtgagttcaaggccaggctaatctaaaaaatcgagttccaggaaggcctattactcaatgaaatcctgtctcaaataaataaataaatagataaacaaacaaactaactccacatgtgagatcttgtgcattcccctgtaaacaaattgaacatgatttaaataaaaacggattccaagtatcccaataatcattttacttcactccaagtgacttagttacttatccagcaaaaactcagtggagtccaaaaaggacacatggtgttggtgctggctaaagatgacaaagtgttgctaagcacactagaatctgctggaaaacagctgctgctgcatcgcctctaagtgcaaaagatacctggctcaggggttactttaaaaccttcctaggaggctgccaatgtagctcagttggtggaacccttgccagggtatgcaaggccctggtttgaatccctagcacagctaatgaaaagtaagctgaaataatgtctttactaaacacatagtgttctgttagaaagcaggctgtgggtgacatcatttagctaatgctcgttaggagcaaacatttgtcagggcagacaaaagcacttctaaacacttctgtgcactcctcaaccagccatgcctgtgtgtcaacaacacatctaaacgataagctcctcgatggaaaacagcattgcttgtagtcagctggctctgggttcttggctactgtctccctttctcttgcattcacaaatggttccaacagtatccccaccatagcaaggatgcaatcactatggattctcttatgctatggctttgaaaaacctatctcaagtaatattttaaaccaggccactacacattttacgcggacgtgatgaaagaattgtaagttatgttctaatgttggctgtctgtgggtcaggaagcttgaggcttagtctctctcatgccactactatcatagaatcagtaagatggaccaggcctgaggttccaaggaaagtgtcctgtatattgtaggtaatagaaaaactaagaaaaatattctgggggcaactacaacataaatacaaaatttaagtcttctttatcatcttctgtccaaacccaatttctatcatactgcccaatatgcctctttatcctaactttgtatcccccagtttcctacaagccatagaaaagtatctcactgcacataggtctattgtccagcttactactcaatgtcccaaaatcatagccatcttgttcctaggaaactggacaatctcctcatatcatcattctaagtcattattgtgttgaagccatcatctcctgtcaaaaacagcctaagtcacatcagacttctgttcccaccctgaactcaatgggatggagtgtatgggttaggagttgcaactataaacacatttcttcctgtcattcagactcagtgcaagtccttcgtttagaccttgtctttgggtatgtgttctcccccccccccccacagtccctgtgaaggagccacgagaatatacttacctgtggaccaaacttcacaagggaaacattattcctaggtgtggtctgccaggaattcttcatgaggaagccaattgcactgctgtacctgtctggagttggcacatactttttgaaagtgctctttgtgagatgaataggcccatcataaatctgaaagcctcgaattgggaatgtcctattaaaatacaagatatgtttaataaatgtgagccaatccctttcacggcatttatgttttatgaatactgctatgtaccctgtaagcaccaaataaaattccaagacacagtggtaagcaagacacaagctgtaatggagtgaaaaatacaatatcctagaagagactaaaaaaataaaaataactgcagataattggtgctacagagaaaattaagatactgtaatacaatagactgggtggagagagacaagctgttttggatataacagagatctctctaaagaacttccctgaaccaactcactgttgatgctttgtttagggctggggatgcagcttagaatgatgcagttgtagagtgattacctaacatggtcctgggtaccatacaaaaaatgagaaggaagaagaggagaaggagagaggcagaaaagggaaggagaaggatgttacatttggtaactctgtatttttgttctaaaagacaaatctgtgggagcagagacagcctcctgtgaagccacagaacaatgataaaaggtaagacataaaagcaggtgaggatgcgcaatctaggtcctcaggcctgggctgtcagaggggctagagtaatgttttccatgtatccttcttccccttttcttatgcttgtaattcctaaccagaattaatgtataaagctaatgccctatttggtgactttattatataataaagcaatcttatttaaagcataatattctgaattctttgggtttcttcacctattaaagtcattactaacagtattgcagaggatttctacagcggctggcctatataccttggcagagtttgacaacaacaatgtttagactagcaataaaacccaactgtctgattaaaactatacttcatgcattgactctgggcacataaatcaacatgacttaaccctcacagacaagactataaacacagtcaaataaaacctgaattcattaatccaggagcaagtttttgagcaagtttttgttgtttctttactcttcctgagcaaagatacaaaaagcattttgaaatgaaactagacgtcagtgtaaaataaagacagaaaaaagctggttgccatcacactacagaccacgccgccaacaacctgtgcttctgtaaaacacatggtgagaaggagatacagcataaccacgaacgaagcacacaaagctgaagccaagctcaatgggttcaaatcccacctccattacttaacaagctgccgttcataaagcaggaaggtgcagtgtatacctgcttgtgtttcgtgggggttaaatgaaggtgagccttggcaagcatttgataaatgctagctactgaacattctggtatggctggggatacatttgggtgtagacagcacgttcctcaaatatatgaatccttggggtcagccttcagcaccacaccatacgaaacagaaagttctttttgctactagtattcatgaaccaacaggattgctacagagtacacgttcacaaggataagagcccagacaggatccagcacaggacaccaggaaaactgacagtctgtctgcctccccccacctcatcctgagccacacccagagagcattcccacatatggtctgattctcggtggaccatgacatcagcttggaagtggggtcttgagaaaatcactaagactttcctctacctgaatttcccacatatatatgaagaccgctccaaagtgagcctcagtcctgggtgctgggttaatgagcttggaagggtgttctagtgctacgtgctgccttaagtactctgattgtcaatatggtaattcctcagaaaattgggactggatctacctcaagacccagctatcccacttttggccacatacccaaagaacactccattctttccacaaggacacatgctcaactatgatcattttggctttattcataatagccagaaactggaaacaacctagatgtctcccaaccaaagaatggataaagaaaatgcagtacatttacacatttgagtaactcagaggattaaaaaaaataactttatgaaattttcaggcaaatggatactactagaaaaaaaatcatcctgagtgaggtaaccctgacccagacagacacacatgatatgtactcatttataagtgaacaattgctgttaagtaaatgataaccaagctacaacccacggacccagagaagttaggtagacaggagggctttataggggggcaaggaaaatagactagattctgagagtaattgggaacaggtaagaaccagatgaaagggatgggggggggtgagggagagagtgtgggagagacaggtggaattggacgcccttgggaggaaacctagtgtggaaacctagtgcagtgggaacttcctggaatctatcagggtgacctcagttaggattcctagtactggaggataatggagtctgaacttgtcatcttttatagctaggcaaggcttccagtgggggagtggatctgagggacacaggaggtgtgggggagctaggaggagtagagggaggggaaactgtgcttggggtgtattgtatgagagaagaacctattttcaattttaaaaagttcaccaaaaaaaaaaaagaaagagagaaaggactctgattgtgatgatagaaaacctgccctattctgtcccaaccccctcgccatctcaaacacacttaattacatggcctcagctgggttctgagtcggctttggcatccaccaactttcattttctagggctcttttcagaggtaatttcccttttccagtagctatttctgaaaaaccagcatcatgaattgcagggaaactgacctaatgtcatagtttatggtttggcaacttctatgtctcaagaaagaaaaaaaaatcaagagaaaaaaaatccacttatataaggtcttatgtaagggataagaaacaagaacagctccttcataaaactgataataaaacctatgacatggataattattaatgctctaaaatctcatgaggataacacacagtaataataatggtaacagtaagtactgttaataagacaggaaaagagcccaagtaaggcaatatatccaggcttattacaggaaaaagctgtgtctccactgtttaattctccattgccaaagtccaactcacctgttcctgggtagcgtccgaggcttctggtctattccccctatacccatatacttgttctgtccaccttgaaatccataattcttactctccccgacaaagagggattccgacacttcctggctcgaaccttcatcacttgggaagctcccatcactggagaaattaggacagtgcttagagacattcttggggaagtttaagctgccccccaaaagaagtcaagctatcatttaaaaagctaaaaaataaaatcttaacctaatacattttctctgatatacattatgaaatcctctatatactatactatctataaaaaaaatccttcaatcaattagtgagttatttgaaaattacatataaacatatgaagtcttaggctagagttgcagggcagctgcagagtgcatcaccatcatagaacgatgtgatccccagcactgcagaaaacacacaaaagcccacacgggaaaccatgcgcacacacacacaaacaaacacacacacacacacacacacacacacacacacacacacacacacacacacacacggaaagcttagttctcaaaagcttatttctaagttaaagcaagctctaaaaggaaagttataatttttaatcttcacactgtttgtcttcctctttcatcctctatttttaaggacttttagcctaaagttcaagcgttttcttttaagttaacaactaccataccctcctgtggaatttcatcaaaattaacctacaactttggcataaatgcaattagtctacttaaaagaagaaggaaaaaaaaatgtgggtttttttggccctctagtggtaccaagaagagagtgatcattttattttcttttttatatactaagaaattataaaacaaactccacacccccattccaaaacatacaaaaaacactatggatgattttaccttatagatttgaaataatcaaatgttttaaaccattacaaacctggcaaaggtcaatccctttccattgtctgcaaatctgtaagaggagaaagatgacggtacatctaagttatcaggaaacacagaagtactaactccctcagtggatgacctggaaaaccacagtcctgatgcccactctccacccacatagagttcaacatcctagtcaccagtgtcgattccaaggcaagggtgtcaggttcaaatcctgactctgccaactgtgatctgtttctcaagcccttccccccagttttttcatctatagtttaaaaataataatatgatctttctcataggattcttgagagaattaaataaactaaacatttcaagtatttgagtagtgtctggaacataataaacaccatgtaaaggtattagctaaaccatctgtttttaatcattaatttttagaaagaattgtatcacgatatttgctttataatttttcagtctgagacctaagccatccctacaggtttaatacagtattaagtttaggagtgaaaactgtcagaggtggtggagaaaagccaagaaactaacggtcagtgggagaaaggaatccaaaactctttttcgacaccaacttaattcactatgcactagacctgtcttaaaatcatgcaactgagccgggcattggtggcacacgcctttaatcccagcactcgggaggcaggggcaggtggatctctgtgagtttgaggccagcctggtctccagagcgagtgtcaggatatgctccaaagctacacagagaaaccctgtctcaaaaaacaaaacaaacaaacaaacaaaaaaaccaagtaaataaataaataaagtattgtttaaaataaaaatcatggaaaaaaatcatacaactgggaaaaaacaacaacaaaacaaacaaacaaaaaccaagtgaggcacttcctgccaccagtaagacacaagtcaacaggcatattaaaacggtcttagaaaactttcattttgagaagcatggcaagatcagaaaaactttaaagagtttccaaaaacaacaacaataaaaataaaataaaataaaaattaaaaacctcagatagtatcaaaatttttatttagctcttcaacataaattgtgtttgctacataaagctaaattccggttttgaagccattttatgtcactagacaagagcagttcctacaaaagctccagaatgagaaaattcagaacatctgcagtctgtgaactgtagtattcatcctcagagctcatcctgtgcattaataatattaataattaattaataatataatgatctcagaaactacggctgtgccttcactctgctcagtttaaaaaacaaaaactaaccggctgtgtggcattcacttctaacagtacttggaaggaaggtggagacaaaaagatcaggacttcaaggtcattgcttacacagtgagttcaaggccagtctaggatacctgaggccctatcttcaaaaaataaaaatttaaaaaaaaaggtaaccagcagtgtcagcagatgttatctctgtagacaatactcacgctgagttctggacaataatgtctcctcctctgacccaggcaccgttatcattgtttttaaaagcaattaacctgtcgatgacagcagcaacgcgtggcttgtcagggtctgcatcctgatgaggccggaacctgcagggtgaaaaagtgaagtgagcaaaggaaatagaaactgtctatatacacactatgggatcaagaggcggggatttaaattaggccaaaataaacaaatgtttaaaaaaaagttaaaatacaacttaattctttatagttcaaatactcaaaacaattacatttatttacatgtaagtttccaggaaaaaaaaaaaatgctgtcatttgttctttggtttgtttttcgagacagggtttctctgtgtaactgctctggctttctttcctagaactcatttcgtagaccaggctggcctcgaactcactgagatcttcgtgcctctgccttccagttgctgggatgaaaggtgtgtgccaccactgcctggggctttcaagtattcttaaaagattaatgtatagaaggcttctgaaaacacatgcccacaaaaagacagccatatgcagaccagacactccagtgtatcgccacaaaattttacatgttacaacaggtgctcactgagaaaaataaccatatatttcaacataaatctatatgaattatgttattaaattgtatgctatttacagagacaaatgtaaattcagtagacagcttggaaatgcctaaacctaaaagacaaactgaattttttatcacaaagactgcacttacttccttcactcaataacatttacaaggactttaatgaaaaagtcaaaaactggtcatataataactcaattccatatgcctaccactttacaaagacaggagaaggaatttaaaaaaaaaaaactgtttaattctgtttcaaaaaatcaattcactgcactgagttttcaatcacataggaaggaaggagcctttgcacgatgctgctattgtatctgtggacccagggtagcacaggtctcaggcacgtgagctccacatactatacaaccactgtactctatgccaggcaagtcactggggaagaagcaatgaggtgggaaagagggaagtagaaagtcagatcccctggagctggagtaaagagtcctctgcaagagcagcacacactctgaactgctaagcatctctccagtcccttgattgttaatactgatgacaacttggtgaaatgtacaatcattatggaaatacatctctagccatgtctgtgatgaattatctagactgggcaaactgaagtaggctgacccaccctaaatgccagtggtaccattccatgggctaggagtcctggatggaatgaaaaagaaacagcaagctgacaccagcattcctctctgctcaatgactgtggaggcggagtgaccagctgcctcacactcctgccactatgcccttcttccctgccatgatgtcccttctttaaactgtggacaaacataaacctttccctgcttaagttgcttcttgtaaaatatttggtcacagcaataacaaaagtaacacaatcgcctcccctgatttaaatgtattaattagttctaatgcactaattgtttataatgcctcaccccacccctttggaaaagttctttatgaaattccccaatttcaaacaaagtgttcttaagagtccccatctctgaattcccaccatttcacattttgaagacaagaagggagactcagctgataagtaatgagtcagtttcctctctaaggaacagactgaatgtatctgctggatcctgcaatcgtggtgtttaattcacagcctgacttattactaatatgtgttgtcatttttactcatgtctgggttgcatgaacacatgagggcacagtctacacatcagtttacacaaaactaaacgtgtaccagctgccaagaatcttgtcgttgttcttccaaattagttctttccagttacaacttcttaatggagtcagtctaattccataccaatatggacacacttgagaactggtaagaaaactcggagtccagaggaaccattaccattttcctagtctgcacatgtccacctatctagcaaagcccttctgaagccataatgggtagtctagctgcaatgtcaacagcttcttaaaaatattcacttctccattcatgcacatacatagaaacaaacacacacaaagtatagtgtgtgcctctgcacacatgcacacaagtgtgagggaacaaatatatgtggaggccatatgttcgtctgctggcttcctcattcactcttcacattattttttgagacagggtctctcagtgggcctggttcttgatgactcagctacactgttcaaaagttttccagggtttctcttatctctctctgcctgggaatcaggaaaacacctaacagacagcccaacaggccagactgatccaggaaattcctcagttgaggaaacttcttcccaggtaactattttatatcatgcctggcttttatgtgggtgccagagattgaactagcatctcatacttgggaaacaagcactgagccagcccagccttttccctgcagccaagtataaattctttcaaggcaggaaaaggagccaattgtttaaccatttttctggcagcaccaacttgacaaagcacacctcactaaaactaccaattctaaaagacttaaaaagcaggtgtggccagatttggtggctcttgcctataatgctaacacttgggatgcagaggcaggcaggtccctgggagttctagatgagacagaactctacaatgaaactgtctcatacacacacaggaaaaaaggaaaaaaaaataggcaattttccataacaactgtgttattcttttggctttgctgattagtttttaattgtcaacttgatataaaatagttacctaggaagaaatctcctcaactgaggaatttcctagatcagactagcctgttgggctctctgtgggtcattttcctgattgctaaatgatgcgggagggcccagcccactctgggtggcactatccctagccaataggtctgggcctgtaagaggctgtataaaaaagcaaactgagagagccagtaagcaacagtattcctccagggtctctgcttcaagctcctgccttgagttcctgccactgcttccttcaatgtggactgtaacctgtaagtggaaataaaccctctcctccccaagttgcttttggtcatggtggggttttgttgttggttttggctgttggttttttgttttgattttttcaaaacagggtttttccatgttaccttggccatcctggaactcactctgtagaccaggctggcctccaactcacagagatccacctgcctctacctcccgagtgctggggttaaaggcatgggctaccatcgcacagcttggtcatggtgtctttattacagcaacagaaagcaaagtaggccagccaatattttttagttcataattttattctcatctgtttgctcctttttctttagctcttctcctttcttcctatttcaggttgatcatctagcaaggtgcatcgtaccttgtgttttgtttacttagtgcttgcttggggcctttggaagtgttccctggtcaccgctcccaaaggtttcctgcttaacttgaccttgaagaatcctgataggtgattcacctactgcactttccctggttttctcctgacctcacatcttagcaatgtacagcaagaccctgccttgcacattaagtcacattcatcaacccccagtgtggttcctgctttattctcttaacaactgagccagtcattattctctccaatgactccaatgactagtaaaagcctttgcaatctatcacccattcaacctcataatctgctcaataaacttcaggtattgaaaaaaaaaaaaaaagcatgttcatggtttctactgaatatgacttcaggttgccacattatccagaacactttatttccacccaagacgttctgtttactttggctggcatgcagcacacgagagagcctgcttcaacactgacccacatcccaaacacattatgtggttacacgggagactaacacagcctgccaggaggtgaacctgaggctaccagcaaaaaccagagccagctcggtcatcacatctgggatcactcccttgaaataaatccaatgcaatgttccatttgaccactaaccatgaattctagatgctggggtttggggggactgacttgtttttcagtgactcagacttgttcccaatgggaaacctttgttaacctctcttctgttcctatttcttcctgtaactccctctaacatcagtttccaccatgacaaaggaaaaaagcatcaacttccttggcattttgttaagataaataaatccctgcgctcaggaccgagacaacaaagcaacttcccaaaactcttacatgagctttcaaaacttcatctccgcatgctgccatcagaaagaacaccttgtatttgaattggaacattctgccctgagaggataagtctggatgtaaattgaaaagcttgccctaccttgcactgttatccaagcagaggtattcccttgggtcggcagcactggagttggttgttttgacacctttgtctacaaataagccagcctgaaatacacaacaatgctcgaaaatgaacatagatcctaaggtacatccacatgcatgaggtgtgaaaatactttgagcttatcatttcacctgaaactgggagtgggggccgggacccacaaagcaaaggtgctgtgaaaagcaaccgttttcctgtacagtgttagcttgtttatttggtcattcaacagacacttacctattgtacacttaatggtttatatgttaattagcaagtaaaatatattccctgctgtgtactgatataaaaactgtcaagggggcatgcaattaaacaaacagctgtggccaaatactaaaagcatagggacaaagaaacaggagagcctggtggcaaaaaggcatggagatgaatcttcctaggggaagggagaggactccagacatgtctcctatgtgatgctgaaatcctcaagatgaggaggaactgactgagcagaagaatgggctgggggtgagcacgaagcagctggaggtcccagagagaaccactcacatgaggagtctgtacgaaagtgtctagaaagaagagatggcgtggagtattagagaacaagtcctagataggacagacaaacaggaacaagggagggagagaagagatgagcgcacatctagccatgcacacacacacttacacctgcagatttaattctcttacagctaatgaaataagtatgcgctgtcatggcatatgacaccaagaagtaattagagatagttttcgtatcataaatacaatttttaaagatggtctactaaagatgtaggacaatggggatctattgaaagcaatactacaaacaagaaaaatatattgcaactaaagattggttaaaggggccagcagggaggagatcagacatgaactaggagacgctgtcagtcattcaggaggaaaatgaaatgacctgtacttgtggcaaggtgagtgtgaggcacggtataattgatgaaatatctggggccaagaaggaaagcttggggttttgttttgttttgttgtttttgattatatcaaacatggaattaactagttgtttaattcactgaaatagaaatagagagatagggcaagcatgaaaatgaagtattccatattgaatgtgtttctaatatgcctataaaacactgaagtataacccagtaagcagccatataaacatagatgacctggctctagggaaagcctcaggaagcctcaacaagcaaagccacaggggctggtcaaagtgtgtacattcgtcacgagtgatcccaacatggcaggagagaagcagggaagcaaagccagggtctcaagccccagacatgtaccccctaatgtgtatgatcccagaaacctgacactgaagacaggaaggtgagaaagagtgaagggggcaggcagacaggcagaaaccaaggacaagagagaaaaggactgatgagccagtctgttagattcacacagatcacatattcaggactcaagattcaatttccttcagttataaaatattctgcataatcattcccaagtttaacaaattaaaacctaattatacactcaggtttaatactcataattaacaagtgcatattgtcatgtcatatgacactaagactttatgagacttagttttcatatcacaaatgtaatttttttacaaattaacgatttgtccctatgagacgctattttccaaatattagccttagtcagttacccatctcacagaaaacacagaagttttttcttctctcagttcttcaagtaagccaaagtttttcctaatacttagatttgggtgactgggtgttatatgtgcacatctgggggggggggggcgtggcaggtgaccctgtgtgcacatgtatggaggtcagagaagagtatcaagtctatcactcctcactttattcttttgagacaggatctcttgttgaacctggaactgggctggtagccagcaagccccagccacgcttttatctctgcttacaacagctctgggcttagaggtgcacacagccacatccagctttttgacaggtgctcggatcccaactcaggtccgtatgcttgcacaataagcaccttccctactaaaccatctctctaaccccaacactgagatgtgttttaaaggatcctctgatagtcatgcatggaaatgttcactgaactgtgatatgagtcatatcacagccaaagacctaaggattacatatacaataaaaaagattaaagtgacttgtgagcaggaaatgagccaacaaaatattcatcatgatggaagggaggggtgaatgacaattaccacacaaacgggagtttctttaggtgacttaaattaagtgcaatgttcttaaatggtatttcgccatttaaatacttggtagtagtaagtggccaaaaggcactcaaggagcactgtggagagaagcagagagaagcaaagccagggtctcaagccccagacatgtaccccctaatgtgtatgatgccagaaacctgacactgaagacaggaaggtgagaaagagtgaagggggcaggcagacgggcagaaaccaaggacaagagagaaaaggactgatgagccagtctgttagattcacacagatcacatatgcaagtgtaggctgtgtcttgggattttgtgactagagaccagcccttaacagatgctggccctagattaggagttccagccaacagaaccctgagccaagtgaacatctgctcatcataaattaccctgcctgtgccacacggtcacagcagcaagaggaggaaggcgccgtcactgcagtgaatataccctgtgcgcataatccgtacttcaaaagttagacgcctaccttaaaatttgaatgaaccctgttgttataaaatattcccagtggagtgagttctggtttctccaggagctgcatgccactggattccccagtgggttccttgtggaataaataccatattccagcatcctacaaatgaaagggcaaggtcattaaaaacactatttttacattttttaaaatgtataaaataacgggtttcattatgacattttcatatgcatggatctctacaccttgctcatattcatcccatccacccctggccctcctccaaactcccctgttttcccccacaaacagttccctctacttggatactatatacacagacatcacttatatatgtacaatccacatgctttctatgaagaaaatgtgtggcacttatctttcctccttgcttctcttccttgtcctgcctcccctcgtcccataatagactcctttttcctgaccccttgcagtcccctcctttaatgtcacatatacacatatttgtattatatctagattctgaatatgagagaaaataaacaaattgtcctttcatgtatataaagcctcagtttttacaaagctaccatgtgaaacaccctcagccgggtggtggtggcacacacctttaatcccagcactcaggaggcagaggcaggcggatctctgtgagttcaagaccagcctggtctacaagagctagttccaggacagtctccaaagccacagagaatccctgtctcgaaaaaccaataaataaataaataaataaataataaacactctgtaacaaatgttttccattgttttaagttccgaattgtgtgcaaaaagttgctcacattatacagcaccccccaccccacccgaagcagttatatctggttgtttttcaaagcaaatacaagtttgcttgcaggattggacaaaagacatagttgacaaatacccaaatccagctttcccattattatatgtctaaaatgctatgcagatggagagccctgcttgccttctgtatgaccgggacaacacagcctttaagcaatgtggtttcttgtgtttacctccaaacctgatcaatagatgagtcatgcctattaaacaactgtctgctggcagacagagctcactggcttctttcaaacaactccaatgcccttcctgttctcaggcaagttagtgccaacgtgggggagaaaacaccacatgtatgaatcagggtgctgtctctcagtgtggaccctgtctgttttactggaggactactggccctaactgcagaacagtttaaaagtttctgacataagtgaaacatgaaaacagaaataaaaattcttattaaccctattcccatttttttttattttaggactgaattaataattaatccaaactgaaggataaattcacactatggaatgttgataaagcagcttttcaaaacttaaacatatagatattggttcaaattcaacatgtgtttatttagtgccccctacatgctgatgtgtagtaagactattgtcaagtaattcacaatctaatggaggaaaaaagataattaaaatatgacatatgtagtatcctgttagttgttactaaaatcctttagggacacagaggaaacatgaagtgtagaaagtatacacacctacatacccaaatgactgtaatgtcaacatttttccatgatcaaagtttacaaatgggtcttaagaaaccaaccattctgtaaaaaccgttggccacctcaacatattggaagcaattcagacaggagaagaaaacataacggggctggagaaaaggcttgagacgacacccttgcaagcagagggcaaagccagccctcccaagatgccatgggtttggggaatgaggaatgtacaggcatacggcagctgtttgatgctagcactgtcatgtctaaacaggcaatagcagctctgtaaaaggcaatgggacggtgcaatgaaatagttttgcctactccaggagaagaaagccctgacaaatcctatcttcacagaagcagttttttccagagagaaaagaaaaacttcaggaatgaccggaagaacatgcctgagacacggcccaagatcaggaggcatttcactgtctggctccaggcttttctgagctatttgcaactgctctcctctgcggtcctagcctctagcagagctaagagaaaacagagctctgactgctgacttaaagcaggcaagggtgcaggcttgcctctctatcctaactctccagtaagaaatgctgagtacaagctcacacaagtgcctcagatactggatggagaatggatgaatggaaaaatgacatcatcgaatgcccagtgtctgtctagtcaaaagacagtcttcaaatatcagagtgcttcaagttacatttcatgttttaagagcaatcacaggcgtaggttcagtggttacaccatgatgcctccatccgggtttgttcaagaagacactctcttcagcttcgctcttacacacaactcagaaatgatggcccatactctgtcctttttaacaggctgaacaactgtgatgtatacatatggatatttacataaaactggatgttcacacacctacactgtaaatttcagcccagttacagtcttgaaagttttgttaaaagttcatttatattaatcagtaattttgaactacactcaactataaggataaattacccatgtttatctgtgggacaatttctaccatttaaaactaattttgtttttgtttttgtttttttttctcttagaaattattctcttcctgtgactgggttacctcagtcaggatggattcttccagttccatccatttgcctataaatttcaagattttgttgtttttttccactgagtaatacaccattgtgtaaatgtaccacattttctccatccattcttcagttaagggggcatctaggttgcttccaggttctggctattacaaacaacactgctatgaacatagatgaacatatgtccttgttgtatgaatgaacatcctttgggtatgcccaagagtggaattgctggattttgaggtagactgattcccattttcccaagaaatactgatttccaaagtggctgtactagttgccactctcaccagcagtggagaagtgttcccctttctccacatcctctccagcgtagattgtcattggtgtttttgattttagccattctggccagtgtaagacagtatctgagagctgttttgatttgtatttccctgatggttaaggatgttgggcactttcttaagtgtctttcagccattttagattcctctattaaaaattctctatttagttctgtaccccactttttaattggattgtttggtgttttggtgactagcttcttgtgttctttgtatattttagaaatcaggcctctattagatgtggggttggtgaagatcttttcccattctatgggcagtcgttttgtcttactgactgtgtcctttgccttacagaagcttctcactttcaggaggtcccatttattaattgtcgatctcagtgtctgtgctactggtacagtgtctcctgtaccaattcattcaaaggtacctcccactttctcttctaagaggtttggtgtggctggatttatgttgaggtctttgatccatttggatttaagttttgtgcatggcgatagatatggatctatgttcagtcttctacatgtccgcttccagttatgccagcaccatttgttgaagatgctttcttttttccattgtgtaatttaattttagctgctttgtcaaaaatcaggtgttcataggtgtgtgggttaatttctcaatcttcaattccattccattggtatacctgtctatttttgtgccaacaccaagcatggtatgtactcactcatatatggatattagacatagagcaaaggactaccagcctacaatccacaccaccagagaaactaggaaacaaggaagaccctaagagagaaatacatggtcccccaaagaaggggaaaggaacaagaactcctgagtaaattgggagcacatggggggggatgataggaaaggggggtaggaaaaagagaaaaggagaagaggagaggggaggaggacatgagggatcaggaagactgagtcaggggagaaatagaggagagcaagaaaagagataccttaatagagggaaccagtataggtctaaagagaaatctggcactagggaaatatttggacatccacaaagatgaccccaactaagatataggcagtagtggaaaggatgcctttgatgtccttcccctataatgagactgatgactaccttggttaccattcctagagccttcatccaatagctgttcgaagaagaaacaggcacccacagctaagcactgaaccatactcctggaatccagttgtagagcaggaggagggatgagcaaaggagtcaagaccgtgttggagaaacctacacaaacagctgacctgaccaagtgagagcccagggaccctagtcgcaaagctggggaaccagcattggaccgaaccaagccctctgaatatgggtgccagttaggaggcctctaacagtggaaccagtatttatccctagcacacaaatggactttgggagcccattccctatggagggatagtatttcagcacagatacagggaggagggcctaggtcctcccccaaatgatgtgacagactttgatctcccatggaaggcctcattatcattggggcgtgggtggggaggtgggttggggggtccatggggggcatgggaggatggaaggaagagggaacaggggattgatatgtaaaataagattggaaagaaagaaagaaagaaagaaagaaagaaagaaagaaagaaagaaagaaagaaagaaagaaagaaaaagaaattgttctcttgtgtgtatatgtgcctatttgtctatcttaaacaaattgtagctgaggttttagctgccttatcaagatgtaactaactcctacacttaccaaaaagaagtgttccttggccagaatggcacagtgttattctacacactgactcattcccataaagacatggaacatggcaaggctttcttttttcgtaagcactagagatgaagtgatgtggtgcttgtccaccaaagatataaacacgagaaaccagaaagatcacatataacacactaccaatccatcctggagaggctccactcctgaagaacagctcacctctgttctttcatttgtcgtcctctctagacagaagctcctaactggcaaggatttagaggaatggaagaaccacctcagtagctcactctcaattagacaagcagaaccagaaaacagtaacatgctttcattacaaaggccccacccatacaagccagagcagtcactcacatgaagacacccaaaaaagtatcatttacctgggagcctgcagctgcattattgatcagatgattgttggggtgggcaatccagaaagttgaaacagccctgcaaggcattgttgaagataactgaaacattcttcacaaaaactctgtccactaaagtctccccagaaacagcttccccaaaattcaaaggccttgaccaccacacaactccctgtccagtaattactcacatacagtctgtggtaggcacaggaacgtagtttccaaacaccccatcacgcataatggtgcacatggaactgttcctgtccgtggggaggagagttcctggcttggtaagaagccccaggttgtggaacaaaatattcctctgttcaacaccatcttccaaaaagaagcaatggcctagtgcatcaaatccaatggtgtctttgatctgcagaaatgtaggtgcagaatgtcattggacacaagactttaggggcttccatgaaaagtgattgtattagacaatgtaagtgattttaaaaaagactaggcttctacagctgaaaacccagaatcttcggtaagagcaggttaaagcatggcatgtggtcagacagtttacttgtgtaagatggaggagtcacgagaatcaaggagagctaacatttcaataacagctgttgcacgtcagggcaaggtgagactacttactagcaagccattggtcccatgcacagtgatgcaccttgaaaagctatgatgaatagacaggccagccacggacgttggcgggctgtaccctcctttagaatccacatctccgcacagatgaaaatgcacaggatagcgtcccaggtgctgctggcccatgtgtttcaattccacataagaaagatggactgaagtgaaattcttctctatctacaaggcaaagtattccaaatcaagtggaaaccttttcaagacgagaaagaagcagcaagtatgcatctatattgtttaaacgaaagatgtctatggaggaaacatcttacaacattttggggtagaatgcttgctatgcaagtgtaagagcttgagtacagtctccagccctgtgtaaagagcttgagaagggatgtaaatgtttgtgatcccagaactgaggaggcagatatgacacagattcgtggggcttccctgccagcccatctagcctaactggtgagtcctaggtcccagtgagaccctgtctcaaaatcaaggtggacaaccctgagggacaaccctcaaggatgatttctggcctccacaaacatgtaaaacacacacacacacacacacacacacacacacaccttcactccacataaacatacatacaccaataagataagaacatatcttttccttttgtgttttaccagatcctcattacctcattaataactcagcactttgggcgctagagctatagctcagtagtagtgtttgattgcattgtgtgaggcccccagtttgattcccagtaccgtgaaaggggaaaacagtagtaaatgctgttcactactggagccatgaactaacttctaatcagaaacaaggaaaaatgaaacaaagaaaatcacaaactgcattctgggggtgaggggtgggacagggtagcatagggagttgtggggtagggttgggtttgttttgtttcattcctcaatgaatcctatgtagtcctggctggcctggtactcaatatgtagctcaggctggcctcatcatcatccttaccggaattctcctaccttggcctagcaagccctaggaatgacaggtgagcaccattacacctgcctgtgtattttgttcaaatacacgtgtaataagactcaacagtgtcagtaatattacaacatgacaaaaccactgttgaactaaggagaccagaatctgaaaatgcacttcatctccataaccacagaccatcctccacggtgaaaaagatcaacattctaactttggaatgtagtgactactaaatgcactcataataaaaccacgataattattaaaccagaacagaggctgtctatattttggtcattcagagtcttattttctttcatctctatatcctccagcacagctggatagctacttatttctaaatcattaccaatgtttagagggtgaaagctctctttaaaactcccctatggggggtggggctcccctgtgatgcaaagttggagcaacctcagtatcttcaagaactggattttcaatcacacaactgaaaataaagcagtaatactgaataggcatttctgaagccagagagccagaagccagaagcaaagctaataatcaaagtttacccaacacagaaagagagctcagacactcgtagtcaaaactggatgagacccaataactaggcacatagaatactgtcaccatatagtaactgcttgttgttctccagaataaaaatctgcacacataatttttatagaaccagattttgattgtgcatattagtactgtcaaccctttagtaatatcaggttcttaagaagccaaaagattctgagaaattgaaggcatggctatcaaggttgtcatagtagtattctctgtgtgactgagttcttcctggtgtatagttaataattcttaatggatgaactataacagtccaggccatataaaggcacaactttcttcttatttgtgtgtgtgtgtgtgtgtgtgtgtgtgtgtgtgtgtgtgtgtgtgtgtgtgatagggtcttacacagcctagcccaatatagtagccaaagctagccttgaaatctttgatgctcctggttcagtctcccaagtctcgggttaaaggtgtatacagttacgccttgctctcttttaggtttgtttgattttgtttttaaacattttctaatatttaaaaaagaactacactgttttttttaatatccatatatatgaataacactccccacagacaatacacacacacacacacacacacaccctacctaattccgccaaaagttccttagcaacttaaacatttcttagtacttagctactaggtttcaaggaactcatcgaatccttccacccaccatcacatgtcctccaaaggtgtcattatcgaagaactggcattgattatcagcatagcatgagccctccatttctccgtggatcacaatgttccgggtgagaattccaacctcagctctcatgtctatcccgtctatgatctcaccaacatgcaggtactggggggtctctggtgatgaggatgaaggaaggaaaatgtcagaacaaagaaaagaaaataagaaatcatccagaaaagcattctccatcatttgacagtctcaagacattatctaacacgtagacatgaccaactcccagaagcagggatcataaagactgtctgtcaatccaactgttcacccaaagccagaactcctgccactgctctcagccccaggcagtcagagagcttgctctaccctctgtagctcagtccttctggagttggcactaaaaacatgggactggcctaacactttccccctagttctttcacttattctgcagccacctgacagacaaatgaagaaacaaatgccagggaatcttagaaggaaatgctcttgctatagcatatcacattgtgcttctacttcaaactaagtgatcagcatctgcataccagtcagtgcagattgccatctttttttttttctttctttctttcctgctgtcttttaaatagctatcttttctggaagtttacaaataatttcaaagaagtttattttctccatctgatgtttttctattaaactcaggaaggagagtgggactttccacagatagtaatgatggatggtatcattgtaacttgggagtttccttttttttcctgtgtgcctagtattatcaaaagaaggaaaagtagaaaactgaacaaaacacagaggggggtgggaaatgccaactctaagctaagaactctacttgacattttactactactttttttaaagcacaaaaatttcaaacttcaatgttctttactcaaaaacaagccttgaagggtgtctgtagcttttgctttgtggcatcacagtataatcattgagtacagaaacaagaaagcaatgtgaaagaaagagtgtgctaaaacccacaagggaaactgagtaccaagggcctctgggcaggagctgcaagcaggacaggagtaggaacctggcagatggtaaccattctttgcactcacagctcacagtaagaatctcgctttgaactgctgtcttccaaaaactgtattactcacaattacagcaggagataaaagtctaatcaaattaccttatttggttctattttaaatatgactaaagatctcctttctttttcagtcaagcaagtgggaattcaaaaaatattttctttccttaagaaaggctaatattaaacgcagtagtggcgagcgcctttaatcccagcactcaggagacagaggcaggaggttctctgtgaactggaggccagtctagtctacaaagtgacagttctagtcttcccagatagccaggactacacgggaaaacactgacttgaaaaaccaaaataataatagtaataataataataacaacaaaagaaagactaatattttaaaaattaattagtcgttaggcaagtttattattatctgacaataaaaaaaatagtaagaaactagaatgaactttagaaaagtttgccaattgtcatctttttcctttaataaggaaatggagaccgaggaacactgattacctgctaggtctcaccagtggtgggaacactgcctgtaagggtagcattctgttcaccgccctctggactctagcgttcagtgcactcaccactaagatcagggttcacgctgatatgggattggtcaggagaaaggactgcaggaatcaaaggccaagaaaagtgcgtgtttccaaagtaaagtgaggagtccagtacctttaactttgacctgaaaacggctgcactcagggcatgggagaagagtgaactcctctgcttgatacatggaatagtcagtgctggcaaccacaattcgatttccggcttcccagctgctgacgtcatccaacaggtgaagctttgctccatctgcaatctccacccggaaacctgaaagagagattcctaaaacaaaaaaaaaacaaaacaaaacaaaaaaaaaaaaaaaaaaaaaaaaaaaaaaaaaaaaaaaacaggcatcaagagaagtgttctcttaaacaaacaaatatgtgtccctgagttgcaaatcaaaaactaaaataagtacaagttgaccatttttttttctgtaatgctaaccatgtgctaatcgtttgtctctaaataataaaaattaaaaaatatggattctggcccccaaaggaagagagtccatacaccaacagccatttacaaattgttacatcagtaaactattctttaaaattagtctgaagattctcagtgctgacatcccgtgattatttcatctcagtacaagaactataatactatcatcccccaaaacattcacatgtactgggaacacttgaacagaagtggccagacacagagaggtctggaataaatgtccagtggctttatttggttcaaatcatcagaagtgacaggactttagtacacagaccatctttgtgctacgaatgaaagtacactgcaaaacatgcctcatttctgtgctttgtgactgctttagtcatttctttttaaaatgtataaacaatgaaatctatttttcccagttctagacactgtacggcccaaggtcaaggcaccaaagtcagtaaaggccggcctctgcatggatgccaccttcccgaggttctacacagtggaagtgcaaacatattctgcactctttgcctaggatgggtttccactcttgctatctaccccatatataaaatgttgggaaacttctggggaagaagctcagtgagtagaacaccacacagtgtgcatggatttgatcccccagcaccccaaactgaaatgacaaggagtctttaaagacttctgaaacatccttgctggaagtaacctctgctctgggcctgggcaagcactggcagtatgtataccttccccatccttgcaaggggcatcagtgaaggcagcagagcaaagcctcttgtgtattgactactctttctcttcttcacagtacaggtcagtgctgtctgccaaatggataattatagcctgtttgatacttcgacctaccagtacttgattgtgacctgtctgccttagctcctctggaggatgacataatgtaaatgatggaaacttctgactactaacaggcggtatggaaatttgaatgagaatggcctatgtgttcatatatctgaatacttggtttccagttggaggaactgcctgagaagaattaggaggagtgaaggaggtagtcatgggttttgagttttcaaaagcccatgccattaccagttggctctctcggcctcatggctgtcttaagatgtgaacgctcacctactgctcccaccgtgatggtcatggactctaccccctgaaactgtaagctccaaagtaaatgctttacatttgtaagttgctttggccacgacagttcatcataacaataaaaaaattattaaggccggtggtatctccaaatattgcctttgaaggtcaaagctggttcatattcaggcagagaagactgaagtgctaatctctcctctaacttacactttggtttgctgcattcaatgtagtgttgacacttcctataatatctgtgatttaaaaaaaaatgtctgagcaaaaagcttctcagggaaatatgaatagaataaaagacagctactttacaaaatcaatagatgaggaaaaaccctcctcctcaaaggttcgtgttcaaaaaatgcttctccagcattaacttacctcaactagcaagatgatgcttactctaacaaactgaagaatatgtttacttgagttgggagaataaaaagacaggaaatttgggcaggaaacaagaacaattagaatggtctcatagtcttagtcaattgcccagataaaaccaggacaagtcataaagtttgtcactgggaactaatctgccctgcctgtgtattttcttttttttttatttgaattacaaacaagattgaattacatgacaatcccaaattacatgacaatctcactgcctgtgtattttctgcaaagtacatatgtgtatgcatatacgcaaacacaaacatatattcaagtacctagtaaactttgggtacattctcagtatgtttcttggactcatatttactaatataaataattccagcaattatcatagatttttatttataatatattctgtttacaaataaaaatgttataaataaacaaaaaatgtttacttacaaacatattttcatttcatatagcataaccttccaaaaatcgaaataggagcttaagaacaaagatcatcagaaatcctaccacaaatcattactccaaatttaaggtttcattataataaaatactccataaagagtttcacattaaattccaatacttttttccaagatatgatactaaattttgatttgaatagtcattagaatttatttctctttaaaaaaaaaaagtcagaaaggacttaggaacacctttatgtttgataatttctcactttttttctaggctgaggagaaaatcctgcctatgataatcttctctgaggagaaaatcctgcctatgataatcttctccgaggagaaaatcctgcctatgataatcttctccgaggagaaaatcctgcctatgataatattctccgggcactcctcattgaagtctaaaaggaagtgagttcagtgtcccacttcctctggagaatttccacccttccagaaagcaggggtcactgaggatgtcagcccatggcagatggtaggagttcccacttccagaaatgagcagccaatgtgacgtggaaatgaaggtccctacacaggaaaaactgactcagccctcggtgtagtctcctccagcctggaactttcctgtagacaggactgttgaacacatacagaaccaaactcatgctagggctggggcttaccacctgtgccagagaccactctggaggcccgaagcagggcttgttccagcttctcctcccatcagagataccacttcctctccaaaacccactttcttagaagcaatatgtgaaaagttcttgtcacatctcagagattccatttgtttttgtttttgttttgttttgtttttttagcatttcatttatgtttttttaaatgtataggtgcttctatttcttgtcttaattacttttctgctgatgatgaaagcaatgtaaaaaagggtttgtttctctcacagtttgaagggacactccatcatggtagggaactcacagcagcagaagcttgaagcagctgatcacacattgtccacccacagaaagaagagcgggacaaaccctgggcagggaatggtgccacctgcagtgggcagatcttcccacctcaataaacctcacccgcccatgtgcccagaagacaggcgtctgcagaactcaccaagctgacaaccaaggtcaactaccacactacttaattagacactatgactcaggatccagaacacagtccaagcagggttgcctaaactaaaatagatcagtagctagtcttgaatttacaagatttaagtttagtaggaaaatcagctccaactctagctatcaaatctgccaagactgacacacagtcttgtcctacagtcatctgtcacagtccttacccatgtctcacagcgtttaaaccacctttgcctaccttcaatccattcactataagccgtcacggagaacttctgaccatccaaggtgtagaattctccttgagccagggccttcccaccagtgctgtggttctcatagtttctcacagattcattgcaggaagaacttccaccatcaatgacaccaactaaagcccaagcttgcctagcaggacaacagcaaacacatctggttatttgtcacagaaatgacccaagccctagacatggatatggtgggagactggttttcaacatctgtatttcatttctcaagtttcccatgaggctgcagtttctaggcttttgctgaggtaactgacatcacagaaggaaatgtacctgatttttcagaaacttgtttttccagctctcacagatgaaacagtgatgactatggcatcagttaatcatgaacttccttcctggacatacacatgagcatgtgtcattctagacataaatcccctgctgtctcctaagaagactgcccctctgctcttttgtagtgtttgctggttgttttgttttggaggcacgttcttaggtaacctaggctggcactaaattatgtagttgaaagaaccatcttaaattcttgaccctcttacctccatgaccaaagtgctgagactgccatcacacctggcttctccatttgttattttttgtttggttgctttcatgatattaccagagagagaactcatggcctgaaagcttccaaagttaatgctgaatgttcaggtagatcaattcaacaatgacttgagcagtggctctcaagccttagcattagaatgacatgagggagaattgataaatcagatcactgtcccactcccctgcccccacagcctaagaattggaggatcaaagaatctgcatgtctagcaaatttcccagtgatgctaaatgatgctcctaaccacactctgagaacccttagggtctagggagagggctaggtcagtagagaacctgatggaaaagcataaagacctcagttcagattcccagcacctcataaaatgcagggtccagaggtacaaatctgtgatcctaccattactgaggtggacatgggtagatcactatagcttactgtctagttaccctaggaaaatctgtgagctccaggttcagtggaaggaaggtcctgtctcactatatgaggtggaaagtgattgagggagacactaaaggttgtcagagggcctacacacacacacacacacacacacacacacacacacacacacacacacacctacctacctctgacttagaggtcacagtttacaacagtaattaccactcttttgactggggtcctaccctttgaaaacctgatctaagacacactgagcattagtagtttttaatgtctatatatttagtcacagttgagaatcactgagttagaagctaagtttctaaacatccttgaagccacagaattgctatcctagagattttcagttttacaaacgattacctgtaaaatgccgttctacttccacaaataacaaattcttaatggactcgccccagctcgtgtcccaagttagtcaaagaaaaaaaagaaaaatagcaacaaaagccaggaaacttgtcttaagaagccaggaaacttgcctcgagccttctggttcaaaacatgaaaagaaaaatgtgaacttcatactttgaggggaaaaaaaaatactaaaagtaatctatgccagacagatggccagatattcagagaaaaggttcactaaagcaagcccacagccttccaagttctgcagctgccctggtgaggattagaggctgagaaccaggcagagctttttataccctcaatgcagcagaaaggctcaaacgaaaaatagtatctcaactattatctcccagtagagaggagatgaagaatgtcagaggctccctttccttcccagaactgccccagccactatgaaacaatgttctgtttcatatagcattatctctagaacattcccacttccccctccacttgtgggaaatttcaatgcactggaacacaatctgcaaaggggtgcctgttcatgtaccctggagacaatgtcaatacaatggaaggctggtgaacaccattctaacttctccactaatgagtggtgatattttaaaggcaatttagaaagcaaagtcaagacagttacagccaatggtgacacaggatcagaagcaatgatgacatagaagaacaaaagatgtcactgatacaccaggaaacaaaggaggtactctgtgcatttgtttaatgatgcaaagatgtgttgtattcttttatgttgcatttgtttaactctgtgatgctattgttactttgcctgtctaaagcacctgattggtctaataagaatcggaacagccaacagtgaggcaggagagagaataggcagggctggcaggcagaaacaataaataggagaaatctggaaagaagagatccaggggcaagaaaaggaggacatcagggacagctacccagctacacagcaagccatggaacaaaaagtaaagaaaggtatataagacaaagataaagagcccagagacaaaaggtaattgggataatttaggaaaagctggtgagaaataagctaaggctgggcacttataagtaagaaaagcttctgcgtgtgatttatttaggagctggatggcgggcccccaaaagaaaaaaagagtagagtaaaacaaaacaaaacaaaacaaaacaaaaaacaactataactctggtttggatcttcaatgttccccaaaaggcccatgtgttgaagccttgtttctagcctatggggccactaaagagtagctgaacttctaagaggtggtggagagagaggggttggagtggctaagggctgcagagaagttaagagtatcagctgctcttccagagctccagtcttaagtcttaaggacccgcactagaggaagcagctcacaacctagctccataggaactgacagcctctttggggctctaaggacacatggacacacacacacacacacacacacacacacacacacacacgtacgtcactaggcttctggcatcccagggtcactcttctcactctgcatcctaggcaccatggggttagctgctttacccactatcattactgttgtgatgttccttaccacaggcctaaagccacagggccaagtgaccattgactgaaatctctcaaactgtgagccaacagtaatctttcctcctaagttaacagtcttagatatttattttgtcacagttactgaaagttgactaacacaacaagcatctaactttgccaagaaaatgtttctattctttggtctatgcactacaggaacaggtacacaggcatatcagtagttaagtaaaggaacagttacagaaacacaaggtagaaagccattctgatatccacaggaaggaaaaaaaaaaaactgtagtatattcattcaataggaaataagctgggtttaatggcacatgtctttaatcccagaacttggaaggcagaggagggtggatctctctgagtttgaggtcagcctggtctacatagttccaggacagctagagctacacagtgagaccctgtctcagggagggagggaaagagggagggaggagggagggagggagggagggagggagggagggagggagggagggagggagggagggagggagggaggtgaaaaaagccagccctgtatgtggcaatatgaagaacactcatgaggtgagcaaaaatagccagacacaaactatttagtctgctaccatttatctgaaactcaaaagggaactaacctaaacctcagtgtgctccctaattgaggagaaagcttatctttggagatggaaggaatgacagtgcatagcaatggtggtaggagggccatggtctgctggcaatgtgttgtttcttggcctgagtggtaaatacataaggatcaccttgtaatctatcattaagctttgcattcttattatagcatttctccacttgtgtgttatcagagtaagccctctgaggctttgctcatgatgtcctgtgtctagacctccattctttgctaccaatacagcacactcctcgagttcctcaggcctcttgcctccagagcatgactattatttccccatgccagctgttggctgttggtttctccttcttgtgttttgacatctcgaaagaaaggtgaataaacagcattgtttgtaatagccagaacctgaaagcaacctagatgcccctcagctgaagaatggatagagaaaatgtggtacatttacaaatggcatactactcagcagaaagaaaaaaaaaaaaaaaaaacatggaatcttgaaattcgaaaccaaatggatggaactagaagaaaccatcctgagtgaggtaacccagtcacaaaaagacaaacatggtatgtactcactcatatatgatttttagacatagagcaaaggattgccggtctacaatacacactgccagaggagctaggaaacaaggagaaccccaagagattgcatagtccctggaaaaaggggagggggacaagaacccctgaacaaagtgggagcatgaggggggtggagaggaaggagatgggaagggaagaaggggagagggaggagaacaagaggactgagacaggggaggaatagaggagggcaagaaaggagatgccttgatagagggagacagtacaggtttggagagaggtctggcacaggggaaatgttaggggatccacagggatgacctcagctaagaatccaggcagtggtggagaagatgccattgatgcccttcccctataatgagattgatgtctaccttggttaccattcctagagccttcatccagtagctgttccaagcagaaacaggcacccatagctaagcactgaaccatactcctggattcaagttgtggagtgggaggagagataagcaaaggagccaagacggtgctgcagaaacttgcagaaaagttgacctgacctactgagagcatggagaccctagtcataaagctggggaaacagcattggaccgaaccaagccctctgaatgtgggtgccagctaggaggccaagacagtctgtgggacctctaaagtggaacctagagcacaaatggactttgggagcccattccctatggagggatacaattgcagaccagatacagcaaggagggcctaggccctcccccaaacgatatgacagactttgaaggtccctggtgaagggcctcgctatccctagggaggagctgggggctggatgggggggaggggttgttggggaacatgggaggatgggaggtcgacagaatggaggggatggatatgtaaatacaagtagtaattaaagaatttaaaaaaaagtcctaccttctgctactagaaaaaagagaaagaaagaaagaaagaaagaaagaaagaaagaaagaaagaaagaagaattcaggatgataatagacctctttccttcactaacattatcttcaagaatttctgtagttaacattgtacccaaaggaaaagctaagtgtgtcacatttcagtacgcagtttggaggccctctcacttctgtcactgcagacatttcccaatgtccctaagaacattcagcagaattacaacttctgggtttttgtttttctttctctttctttttattttttttctttagttaaatggtgagccagttacttccctcagcctccagacagtattaggaaatcaagggtgacgagtagagactcttctagagaattagagagaacttctgtatgaatgattgagctgagctgagctctaactttgggctgcctctcctatgccagaactggacagaactgagccaatgaagaaagaggaatcaaagtaccacgtaagggactccaaacaaattaacatgcaaaagatgccaaaaatgaaaaaggaacctcgcacgataccccctagggtttttatgacagccagtccatggaactgtgctctaacctctcagctgctcagctgtctcaattagcctaggcttcagtgtcctcagtttcattatgctcagaggttaatggtaacaggaagtctcttcagaggcaaattatcttcactctgcccagtgcttttcagaaccacatttctgtgcttttccgccgctgagagacaattcacaaagggcttcataagtcaaagccaagactgttctgtgtaccacatctaatagttaaacccatggttcaaacaagcggcaacgggatgcaacgataggaaaggcatctggagtgggtagccatgcagccagctaaatcaacagcagctgcctgtggttctctgcccacctcctccgctttcacaggatatgaactttactacagagttggaaagagaggaacgaggtctacctacctgtagcccagcccgtggatcagcttacttcccaaccggtcctggatcatctggattgttccctgtaacaggctcttgactgctgaatctccaacagcaatagctacaatccgaccgggatcctgagctctcaaaaattcctgcaatctcctgctctcattgtggtactcgtgggtatcaaacttctcatgttccaaaactctggctgtgtcttggtcaatgaccctcacattaaggccccgggaaaagtccttttcaaaggcataggaaccaaagggcaagcctgaggaatgcagagtccttgccagcatggtccaggatgtcctctgtgccccatgtaactccagtgtcccgccagcctccacgccaataaactttttgccaaatgttggcatactttcaccttcatctgacttgccatacaaggtaattgtcgctttggatctatagcggcatttttctgctccaatatgaagcgctccaccatcctggatcaggatgtaacgagtcctcaaggtaatatttctggatccgtctttatcatctccaaacacaagcagtcctgaaaggaacaacacgacttgaacctttggaacctgtgttctagctagcagatgtgggtcactggagggggcccatgtgggtgattggccccctggatccaatgccagctgttaccatgatgtgaccagctgcaagatcctcagaggaagactgcatggaaaccagtctccatgtctcccctgccactgtgaagggcaccctctggagctttgagccaaaataaacagtctgaaggcactcctgtaacacctaatcccagcaatgagaaaaagctaggcacccctttgtcttttgtcttttttttttttttaaacaaaatctactacagatatgaggaacagcagatggcccccactttacagagcatccctggggctcccacagacaggggttaattattacctacctccatcctgaatgactatagaattcactgtagcatctgaggtcaggcggaacatatcaccctccttgataacaacatgttttccagaatcttgtcctggatcccagtttctgagacgggggttttgatctggacagttctctacaaaacatcacaacactgatagagaatccaatccaacaaggtgcaagaaaaccacatgacaagccaagccgaggaattcctgtcattgaacacaggtctgcatggaaagtaaagagtcacttgatctcctgccactggaatggaagtcccacccattcccaaacacaagaggtatgaattctttatttcaatatattaaaaaaaaaaaatgttaccacaaaggccaacctttccaggataaaaatgaggttcccctgactacctactttggaaataaacaacagtaaaaatgaatttctctggaactcacactataaggatgttttagaaaagaaaataacagactggcaatgtagctcactggcaaagtgctagcttatcatgcctgaggtcctggatttgattcccataatctcagacagacagacaaatagacagacagacagatagacaaacagatatatacacacacactgtgtgtctctgtctcagtctctctctctctctcaataccttgactaatggaaacagaaatcacagacatttctaacacgtatgttagatattccaaagttccttcctaaacacagagaatcatagagtaggaggtaatggcacctctttccccgcatgcacactttcccaacaaaactagagaaggcacatggccaaaaccatgacttctcattttcagggatgaggaaattgcagaggagagaagccaacacaaagattagttagcaagttgagtgatgtggaagttccgcctgaagaaatgaggtccgtggcttataatcttccttcaccagaattgtaacttgcctcttgagtagtagataataaaatgatggctgtttgtgtatgagctacttctaagggaaagaaaaatcatagcttcacttttgatcagctaacaactcaagattttctggagatcgttttgtctactctgtagcagatactatgaattttttaaagtatagatgggagtgggcatatttctacaagtatataaaccagcctaggagaaaagccatcatgtatgaattaagtaaatggtaaataatacggttcgtaatttaggggcaagtctgctcagacaaaggaagaacaagctagaggtcctgaggcagcttcatagactcagaccccaaaagatgaatagcacttaaataagaggaatatgaagaggagacaagaatacaggaaagttgggactgagagataatggaacaataaacaatgcttaagagcatggaccaccctcacagagttcagttcccagcacccatatctagctcacaattgcctgaaactagagttccatggcatccaataccgtcttctggcctctatgatcaacccacacatgtggccattcactcacacacacacatatacacaataaaaactaaacctatttttaaaaagaataggagatatatatatctcatccatctatcaccccccccatcctagtccatttgttactcagctcacctgtatttcaattaagcacttgtgtttaaattaagcaaagataggaatgagtgacaaatgcttgaggacaacaaggagaaatactgctgaggctgaaggctacatgtgaaaggagagagactactgataaagaagaaagcatcctaaatttgcattttgaacctgcatgcccaatgtggtaatcttcctatctctaagaacttaagtagcctaggccgtcacttgaagtgagagcaactagaattaaattagaatcactaaggccttggcaattatttgatgggattatttttctcataccagattcacaattactatttaattcttcattataaaccattatactaaaggcaatccttggagctggcagtgtagctcagtggtagaatgcttggttagcacaggcaaagatcagagtccaatcccaagccctacaaaaactaaaatgacttttcttcaacctccctatctcataaaacatagagctggaattctccagagtgtcagataagaagcaaatgtcacatgtcacaagctactgagaaagaattccagtcggtggtgacctgaagccaattgtaagagttatgcaattgctcttaattgcttgtaatcaattcctggagagcacactccattagaactatcaccccagaaattcctgagttgttccttccagcaaaatatacttaaatgaggaaatgtatacgatgtgcagaaatcatgaaaaaatcaactcagccagtcccatgtcctagctagcccacttgtagagtaagcacatttgtaacagcaaaaaaacaaaacaaaacaaaacaaaaaaatggtgaggctgaccataaaacagttcaacatgctaggtctttccagtgatcatctcagttgtattgccaacatgtggaactaaagaacactgactcaagaagccacatttgcagcccagggttttggacggactaagaaaataccaggaaaagccacagattgcagctctgatttcccaccagtctgccttcccgctcctgatgattatttggaaaatgtgaatcagaacttggttattgtgtttggaactgggaatagaaagtcaatactacaagcaagggaaatcaatgttataaattcaaagtgtggccaaatagcttggtcaacaaatatgtggacaggctcatctctcttactccctgtttattcttttggaaatgttggtaactacttcctctaggaccttaaaactgacaaaatcccatttgtaagttttacaaagggcaatgggggggcctcaactgttaccctattatatccagttaaggagacatctactcagacaaaaacctgtagtagactttgttaaaaaaaaaaaaaaaaaaaaaaaagacaaaagggtactcaggttgtaatggtctggtgtcctctatgacacacccctggggcttctgagttttaaactgttctatgaagctaatgtttgttgaaaacataatgaagataacaggcaacacatttctccaaaatcaaaataaatttattgccattaaatagattctctctctctctctttctctctctctctctctctctctctctctctctctctctctctctcgcgtgtgtgtgtgtgtgtgtgtgtgtgtgtgtgtgtgtgtgtgtgtgtgtctgtgtgtgtctgtgtgtggtgtgtgtctgtgtgtctgaggaatgaggagtagataacatatgcatgtggaggcaaagagaacaacccacagagtcactcctcagttggactagactggctccattcagactcaggagtccctcaccccttcccagtgctgggattacaagcacactcaaccacatctgttttttttttttaaatgtgtgtttgtttgtggatgtatgtcatgtgtatgcaggtgtccactgaaaccagaaaagggtgttggagcccctagagctcaatgtggttgtgacccactagcccaccccttgtagattccgggaactaaactcagtccctcaccaactgaattatctcctcagcactggtcactaaatttctgacctgacttcttgaaaagcagatatcatttaagaaattaaagttccctacacgatattcagctttggacagaatgagtaggactagacaaatctatcaatttacacataaggataactcaaacatatttttaaaatgttttacactgtttaccaaggctgttccaaatcacaaaacaatttcttttttagtggcttgtttgttttttaaaatgaagtccactttatcactacatgtatgaccaaataaagctaattgcaatccagaactcacagttcccaccaagaacaaccctgcactctcccaggaagtagtaaagactatgaagagcttttgaagagatgctccaagaacaacttgagccctgagacacagtggggggccaaaaatgctaagaaagccaagtcttcacatttacagtgtcccacagattcctcaaacaactgctctcattcataagatgacacatctcatcctacccgtggattaggtagttggagccagcctaagcaacaaaaggttgcttttggtttttgttttttttagtattctacctcctcaacttagttccccaccaccaccaccggttttcaagacagggtttctctgtggctctggctgtcctggaactcactcagtagaccaggctgtcctcaactcacagagatctgcctgcctctacctcccaagtgctgggattaaaagcgtgcgacaccaccgcctagcgccctagctcttcttttagactatgttcgtcttagctcttttttttaaactatgctgtatgtgagaagccttagtgcttcttttagactatgtttgatgtgcccgaatacacatgcacccagtacataccatctggagcatattttgaggatattcccaaaatgactgcaagcgccacgaaaaacgagaaactggttatagcaaagcagatgaaggtgttcttatgtctcttttgctttcgattctccctaggcgtttgttgctcctcaggggagaaagcaaaggttgctgggccttcttggttggtggaggtcaatttggctgaagcagggttctttggaggaggaggaggacgcaagggaaccaccttcccaggaacgtaaccaggtgagcgatggccgtttccgttttgcggttgcaggaaagcaggggagtgtcccctggaaccagcggcatacatgataccttgtcactgtgaaaaggaaaagaaggttttaaatgtgtacactgtaatggctttagaactctgtttggaaacagagtcctgtagaccagggtgggctagaacttaatatgtaacccaggctagcctccaacaaatctacaagtaggcatcgttatccccattttgttcatgaaaaagctgagccctagaaagagaaccacaccagcctaggaccctgactctaaagaccagactctttacagtttgggagggcataatcagaacctaacaggcctcaaaccagcgtgttaatctctggaatctcccatgaataaattcactcaactaataatgcgtgattcttttttagctgagaaaaacctggacacacacaaagaccctcctctctatgttcattatagttagcaccaagaaagaacgagttgtgaataaaactgttgtagggagatggggagagaaagaataaagaagggaaggtggagggagagctagctctaccatgtaatgtcttgctacactaactgttgataactataatgtgctcaacagcttcagaaatgtgacacccagcctcttccattgtttccttaacaacccagagcatcccgagtcacctgacttcatgcaataccctcacaataaattccccgtgtctgttaccaaacaaagaacaagaattcagtcgtgcagggagctccaaattgcaaacccattaaacataaaatgacccactaataagtatcccccggacccaaatgacatggagatcaatggagaacacaaaggaattgatcatgagtttacatgaggcaaagaccattctcagtgtcagtgggtctgtcgaaatgcctaagtctatgggcattcactcgatgtgtgaataaaagccattgtttagatgaagaaacttccacttcagacaaagggaaaacaccgccatccaaggtgctattgaggaagctgctgtatgacccaaggatcagatccaaacaatgaacacagccaagcagacagagtgtgacaaaaaaagaaggaaaaaaaaaaagctgtccattaacaaagaaagggatagaggatgttcctgagtgccaggatcgaggggaggggacacaactgtcatgatctgctgtgacaggggtgggatctatgcccctagagcttcaatccttctgcctcattgtctcagggtgagaagggctggtgttatttatcaagctgaagagccctttcgggagacaatgtgtcacaccggatgtagccacaaagaaataaaaaataaaaagcagtgagaggctccagggagtcaccaatccactggaaataacagaatagcatgtcctcaatgtcacagaatggcaacttaacgtgaaaactcagaaggcatctgccataaatgaatccttctgagtccattagcccactggctgacaactaaaaatgaaccaccattcttgtcctcaaaagttaaacagtacttccatattttaaaataaacaatgtggtaaaacaaaaaaatcttattttcaattcataaaaatccttaaaattgtaaaacagaaacatgtttccttaggtttcatttcacatcgatgggtttactctagacatggtactatgaatacattactttaaaaaataccgattgccacttagagatctaaattattcatgaaaaatgacgtctcactaattcaggaagcagcagttctgacgctgtcagagaaacgatgagggtcagacaaaagctttgcagcatcctcaagaaatctagctcccaaactcagttttaaatcgcttgtttggaagataaggtaaaattcacccacgaaatactgccaaaatgtgttcagcctcccaaactctcaaagttgtttacccctgaaaatcctgcagcagcaggacactgaagtttcctctggtgttccagcctcagtgtgagcatcaaacacaatctggtttttactggagccttatttttcattttatgtgcattggttttttgttttgtttttggcttctatgtatatctgtgtgagggtgtcagatattggagttacagctgtgagctgccatgtgggtactaggaattgaacctgggtcctctggaagagcagtcagtgctgttaaccactgagccatctctccagcccccaccattcaccttttaaaggtcgttcttgtagtgaaaatcagattatacaaaaggggctcatccatattttactatactttgttttgtttgatttgcttggttaattggttagtttttggagacagggtttctctgggtaacagccctggctggccttgaactcagagatctgtctgcctgtctcctgagtgctgggattaagtagcatgtgctactatggcatggcacagtccctgaaataaacaagctacccacaacaggaatacccaagtctttcatgtagagatcagagaaacattctacagtttttaaagcataatttttggtgttttatgatatttcaaaagtccttgaaataaccatcgtgagtatttacttacctgataacttaaaaatattagctcaaaagatgtagtaataaatcataaagcaaataattaaacattttacactggtaatgcaaggaaatatgtaagacagataactaaaagaaattttctaagattataaaaacctgactcgaaaatgctgataaaaagcattcaaagaaatatggaatatgtaatattttttttccaattctcagttcctcctcgaccacccaccaaaataaccctaaaacctccctgttattttaattattattcttgagaaacaggtatgtacatgcctcaaataatagcaaagctgcaggaacacatacagctgataaagagccacaaattaatttatatggtataagtacagccagttatcacagaaagcaattatttttaattaccataatattaagggcaaaatgggtttttaagctataagaaggggtgtggccttgagaacactgttttttgcagggaggggttaaataactgatggtttaacccctgtcttgtctaggagactatctcaagagtccctaagtcctcaatccatttgctcttcctgtactgtttaaagtcttcctttcagccgtatgcttcaattagtttgtgttcttatccttggtctcaccttggtgtttacacaggaccttacacacaacaggtactcaagaagtggtcactgtgcttagacctgcaaaggaattcatcataaatgctaggaggtgaggggtgtgtgtgtgtgtgtgtgtgtgtgtgtgtgtgtgtgtgtgtgtgtggtgcggtggtgtgaacacaccaccacacgtagaaaaagagatgggtaaaaatctatctgattttgtgttatgttaagtcccagaaaatctgttaaatgatagatttctctatttttctctcttcccatgactcctatctctctccacctcttctccccactgccccctcgccaggaattttctatttaacacttcaagattcttgaggctctgagaaactactatgtgccattgactgcaactgggagaaattaagaaccttatttcgagagaaaaagtcagttcttgtttaactattacagttctaacctgcagtctgctgactgataggttgattcaacatcagcaagcaggaattttacaaacttgctggctacacgttacctttccacaatgtgccataatgggttcaatcacacagtatgaaatgtggtagacacaaggaaaaaaatggaaaaccttcccttccacttcttgctgacaggaagaagcgattagacggctcagagggaaagtcctctgtatgcggacacagcagatgcacaccaaggtgctgattacagtgacggaggacacctgctctcattctgtatcatcatcagtccaagtcacccagccctctacccactgtacaggcagactcccactgtccttcatcagacatgcatgcccacacccagtcatatggaacactccgtaagaatccaaaagccaggcagagtggcgcacacctttaaacccagcactcagggaagcagaggaaaggtggatctctgtgagtttaaagccagcctggtctacagcgtgagatccaggacagccaatactatacagacaaaccttgcctcaagaaaaaaaaaaaaaaagccaatccttttgccttgtttacactctttcatgttcccactagagtgtgtgtgtgtgtgtgtgtgtgtgtgtgtgtgtgtgtgtgtgtgtgtgtgtgtgttgggattaaaggcatgcaccacaaccaccagctcctccaaactataatcttaaaaagaatcatttttttttgtttttggggtatgagtgctctgtctgcatatatgcctgtatgccagaagagggcatcagaacccattgtagatggttgtgaaccaccatgtggttgctgggaatggaactcaggacctcaggaagagcagcaagtgctcttaaccactgagccacctctccagccccaagagaatctatttttaaatgaaaaccttaggcttgtggaaacagccaagatatcagcataacctaatcaaagatttcctaagcaaggtaataatttttgaaataatcaactgaatggccaacaatctttgcttctaagaatgtctgtgcaacttcttaaaatttggctaggcaatttttctcttttattaagatcttacaatagctctacaatgtaatcagtgttgggtccaaatagtaaaagcatacaacgaaaagtaaaacattccggaagaggtgtacacaaattataaaagcaaataagacattttactatggtcatctgaacttctgacccagccgagctgttggctcccagctgctttgaattttcaattaagattctatattcccaacttcctgtttcttagaaagagacacggcagggaataacatcacagtgactttcaagtttgcagtttggtttagtttaagggataatgttaggtgtctcatttaacttttctttacatagagattgtatctgctgctacacaaatgagctcaggcttgaacacacaaaactgcttaataggagataaattcagagctggcggtgctggcacacagctttaatcccatgctaggaggcagaggctggtgaatctgtgagttcaaagtcagcctggtctacagtgtgagttccaggacagccagagctacacagagaaaccctgggtaggtcggggtggggatgggggggataaacagcgcctgggaactttttagggcctttaatttttcaaactccaatgtcataaaaattgtgtatttgaacatagatttctgtggaaaaaagaatggttggaaagggtgagtataaaatacgtctttctaaaataaccactatgaggaattctgtacaaatcctatgtctatacatataatggctcttggaagaaaacagcaggttgaaaaaattacgtgctctttcctctgccatctcatacttgaataagcacagccccagagaaccaaccacaggccccacagcccatatgcactgctactacagggcacacactccaccaggacactgcatctcttaatccctgccatttccatccagtctcaaagccagggtatgtcacaatccctgcaactgtctggctttggaatcttagagggctttcattgcaactagcttactttacagtgatcctgtttcattgtcaagaagcgctgtgtacccaatcaaggttcccaggtactagaggaacagatatgccctattacaaatggtcctgtggaatgaaaaaataagggattcagaaagtaattattgtatattctcctatctgctttctccacttgatcaatgtagatgcataggatgggtatcaccaaaattaagtactaagtattattcacattatcttcctcacaaagaaaaactcctctaaaatatactaaatctatttacagaaaatacagggaaatcataaggaaccttccaaacatacaacgctaaaaagactaagtgcacttaaaaaagaaaaatcactgccactaatcatttatattcgaataagtatttttactaaaaattacttttcctactccaaaaatcacatttcaattaagttatactgtcctaggaagctatagtcaggatatagtaaacacttgaaaaacaaaaactgccctaaagacctcctgaaactgagaagcttctgtaaggcaaaggacacagtcagcaagacaaaacagcagcccacagactgggaaaagatattcaccaaccccacatctgacagagggctgatctccaaaatatacaaagaactcaagaagctagtctccaaaacaccaaacaatccaattaaaaagtggggtacagaactaaatagacaattctcaatagaggaatctaaaatggctgaaaaaaaagtgttcaacatccttagccatcaggaaaatgaaaatcaaaacaactctgagataccatcttactcctgtcagaatggctaaaatcaaaaacaccaatgatagtttatgctggagaggatgtggagaaaggggaacacttctccactgctggtgggagtgccaacttgtacagccactttggaaatcaagaaaatgggaatgagtctaccacaagatgcagcaattccactcctaggcatatacccaaaagaagcacattcatacaacaaggacatctgttcaacgatgttcatagcagcactatctgtaatagccagaaactggaagcaacctagatgcccctcaaccgaagaatagatggagaaaatgtggtacatttacacaatggagtactactcagcagaaaaaaacaatggaatcttgaaatttgcaggaaaatacaaatgcaggatggaactagaagaaaccattctgagcaagataacccaatcacaaaaagacaaacatgatatgtactcactcatatgtggattttagacatagagtaagggattaccagcctacaatccacactgccagagaagctagtaaacaaggaggaccctaagagagacatatatggtcccctggagaaggggaaaggatcaagatcccctgagcaaattgagagcatgggaagaggggggagggagctatgataatgagaagggaagaagaggaaggatgcagaggtcatgagggagcagaaaggttgagtccggtgtagattagaagaaaggatatgtgatatgaaaggtagggttttagttggggggagggggtgtaggggaggaagggagggagaagggaactgggattgtcatgtaattcaaataaaagaaaaaactgccctaaaaataacaaaacaactaagtatttacttaaaaacctgtaaatgttcctagtgaaatcagccacttaggtacaatttcactgagtgtatcctcagcaagttacattgtaatcatctgtgcagacacagatccccctggaaaggggctggagaggtagctcaatggttagagaatatgttattcctggagaggacccgagttcaattttcagcatccacatggtggctcacaaccatctctaactccagttccagggacatgatgatttcttatgacctccctgggcaccaggcatgcatgtggcgtacagataacacatgtgaacaaaacattcataacacagaatacgtaaatctttttttaaaaaaattttaaatatttagaaatatctgagaccaaaagtcagccaagtgaatacttcctaactgtagaagtgtcctttaaacaacagcaagagagctggcccctgcactctggagagatggcccccacccctcaccacaggccaaggtgaactgaccctgaaggcatgcatgtaggggagctgactccatcccctcactcaaggtgggtggcccgatggtcgcaggggaccaggaccagcttagctactatccaggcccaaggccgggcctagtatctaccccatctaggacctgctggagctggtgaagggactggtcctgtggaacaatcccagaggacttcctgtggggatcaagtgatggtataataccagaaaccagaggccttgaaccagaccactgactcactgcaatagacacttgccaggaaaactgatgggacaaatgggtatactatatggcacacggaaccctccactgccaccagaactaatggattggggctagagaggcagggaagaagcaaagagatttttgttgttgggatttttgttttggcttggtttgggggtttttgttttgttttgtttttgcttttgcttttgcttgtgtttgcttgcttgattacttttatttgtttccttatatgtggggcatggcagggttgaagggaggatacgggggaaccaggaggtgaacagaattggagtacatgatgtgaaactaccaaagagtcgataaaaattctttttttaaaaaaagccctttaagcattttaattaattctaatgtccctgtccttcaagccatatgaggaagatgtctgacaataaatctcctgaacagccctgccctttcagctctgcaaatgaagtccataaaaagcagtgggtgacaatcctaagtcctcagcagctgaaacaagcccaaggctgaggtacatcatcaccccagtgttaggaaaagtactgcctatctgcagaatggagggttgaggcagcaatcaatatagctaatactacttgcccaagagaaacaaaaacaaaagggagcagagcacacaagcctccaggcggaactgcggagctgtggattatgaatggcattcttctagcctaaggtcctgcaataggaccaagcaccagaccaaaccaaactggattcactcactcatgctcagtgccacatagccaaactgtaattaaaagggaaaaagatctcaaaacaaaaatttgccctgaatatagaaccttgcagtctacatgagccctaccagtaaggaccctcctgctgctgggcacagaaaacaggaaccggccttaggcagatgccagtcaggcggcttttactgactcttctgtttccttgttcctaccttacaaagccagcctttctgcagagtgagagccgtccccactcacaaatcccaaataaaagccaagcagatccccagctgtatgctgtgtggtttgtacttccgacagatcgaaaaggctcctcactttgaagaattagacaaaggcaaaagagtcatttgcatctcagccctctgctgtttctttttatcccattactcttcttcagattccttccctctccccccattcatcctcttaaaaagatccccgcctcttccaaggctccctaggtcagccccccaccaccatttcacccttgttccccattggctagaaagacacggaggcttccaacctactgacagtgacagatggctgtgcagaggcccacaatggaggcccctgaacgtcatcccctcccagctgaccttctgaagaaaaccccaaagctggtgtctgacctggaggaggccgatttaattaatacagcaaagggcagggctgccagcggtctgcattggctggctgcaccctctgcagactgtcagggacaaccctttaaaatgttgctcaagaagaaagtgccaggcgggaagttatgccagtaagagctaaaaggtaggggaaaggctaaaagaagaggtatacttgactagtaagcacagatacatcaaaaggtcatgatctagagacacactaacattgaaagactatgactcacagaataaagactatgttctggcctgtttttcaaaccaaggacaattatcaaagatgcccaaactgaaatgatccaggctattcaatcatgggaccaggacccaagtatactaccaccgttccccctaaaatgaagtgttctaatcagagaacacaaaaacaaattccagtttgtttgtgtttggtttttgagacagggtttctctatgtagcttggctgtcctcgtactcactatgtagaccaggtggcctcaaattcagagatccaccggcctctctactgggattaaagctgtgacggtcatctcttgacacaagagttctgcttcacaatggacatggtgattacaacatgcacacacatgtgtgtgcagcatgcacacatgcatgcacacgcatggctggccctccaatcaagaagccccaagtctaatgctaggctaagggtggtggggagataacaggagtcaacatgtaagagcagtacatggtgggacaaagaaactagcttagtggacctgaatttatgcgatctcattcagtttccatgaatacaacacactttgagattcctaaaagccccatcaagtgggctcacccgggaccactcccaccaattcccttaccttgtgagggtgcactaacagccacctctgagctctgacactgattgacagtgcaccaacaacaaccaaggtgattgaggaaacggaagtgtctcgtagtctttgaatcccgcaggtatgtcaatttcaggaaagttctaaaccagactacaaaggcatactccatcttctctcagagcatgtggaacctcagccaagcaaagtggccatattacatcttgtcagcaattgccctgatgttcagcaagactgcaggccttgtactctcgagttgctcctcccataagcaagatggtggctggagtttgtacagctaaacaagggctgaaaacctgagaagcatgaccaagtgtcccagactcaataacaatagcaacaaaaacaaaaaggactagaaggttccaggtcaagataagacaacgtaggcagctaggaaaagctagctactggctgaccctggtgaaaatgactataggtcaggtccgtgtctacatttggccttgtgagctagacctttgaattcatcccatttccttccacagcactagctcctcaccacaaatggcatttatttataggtgattattccaaaggtggttggggagtggttattaatgcagtcccagtgagcaattaaagccacttctttaacttcatgagtacgatcttttttttttaaagattttatttattatgtatacaacattctgcttccatgtatatctgcacatcagaagagggaaccagatctcattacggatggttgtgagccaccatgtgcttgctgggaattgaactcaggacctctggaagagcagttagtgctcttaactctgagccatctctccagccccccatgagtacaatcttttaagcttcgtatggggccgtcatagtcagtcaacaaagttgattttatagtagtggcattttcaaaacaaaagacgcccacaatgaattttcctcatttcttctgaaatgggatgtaggcatattttctgctactaactcaaacttgccaaactattcattctttggaaaagagtattggaaccaatagccaaaaccactctaatgctgaaggcttccagcctctaaaatgaaagccaataactaagtaaaagcttccaaagcagtaactggttcactcaagagacttggtatgcagatctgaccaagaagacacctagtttgtggtgcaataggttgtgtgttttaagatattccatcaaggggctggagagatggctcagcagttaagagcagtgcctactcttccagaggaccggggttcaattcccagcacctacatggcagctcacacctgtctgtaactccagttttaggggacccatcacccatggcaaaacaccaatgcacattaaaaaaaaaaaaaaaaaaaaaaagctgtttcatcaaactcagtcatttctcagtgactcaacatgaattgccctaaactgcaattctttccaggaaccatgccccaacagcatttctacacaatgctaaaactatcttaatacactaaaactaagaccatcatctctcctcagcaacttgtatagcataaaaccctcatccatgtgacaagtagaaggaggtggacatggagttcaaggtcatccttggctgtgtaacaagtttaaggccagcccaagctacttagtcaatacctcaaacaagcaaacaacacaagttcttaataaatacaactttctatttgcctaccatccaaactaagaagccaccctggtgcacttcatgtgaaaaggtcaccatttctcaccttgtaagagaatgtcttgctacaagcctgtctacagaaggaatctactaataatttcaaaacagattggtctcacagatcaaaggactcatttgtaaggagacagcaattacagtttctgggtctgtttcactttttaaaaagacagtttacagtggagtggtggtggcccacgcctttaatcccagcacttgggaggcagaggcgcatctttgtgagttcgaggtcagcctggtctatagagtgagtttcaggatagccaggactatacaaagaaaccctgtctcaaggaggaccctaagagagacatagatggtcccccagagaaggggaaagggacaagatctcctgagcaaattgggagcatgggaggaggggagagggagctaggagaatgagaaggggagaagaggaggggtgaggaggacaggagggatcaggaaggttgagtcgggggaagaacagaggagagtaagataagagatactaaaatagagggagccactgtaggtttaaagagaaatcaggcactagggaaatatccagaggtctacaagaatgacaccaactaacaatctaagcaacagaggagaggctaccttaaatgccctcccctcataatgagattgatgactgacttatatgccatcctatagccttcatccaacagctgatggaagtagaagcagacacccacagctagacactgaactgaactggaatccagttgcagagaggtaggagtgatgagcaaagaggtcaagaccaggctggtgaaacccacagaaacagctgatctgaacaagggggagctcatggaccccagactgatagctgggaaaccagcatgggactaatccagacccccctgaacgtgggtgtcagtgaggaggccttagaaatctattgtagatctcttgtagtagatcagtatttatccctagcataggaatggactttaggaacacattccacatagaaggatactctctcagcctagacacacgtgggagggcctaggccctatcccaaaggatatgacagacgctgaagatccccatggaaggcttcactctccctgggaagcagaaatggtatgggataggtagggtgttagtaggaggcaggggagtagagaagggagagggaactgggattgacatgtaaaacaatcttgtttctaatttaaataaaaatgaaaaaagaaaaaagaaaccctgtctcaaaaaacttaaaaaaaaagacattttactaaacaccttatacttctatctaataccatgtgccttgcctaatctaaaaaaatgcaataaaatatttgatgaacataggtcctgacaaccagcattaaaggtttctcaaaatgagcaaagagaaaagaaaagaaaaaaaaccacacacactactcctagcatgcttttactctgattcacaaaaatgtctgaatgtttccaggaacttgcttcttaggaaaaaaaaaagtgcacttctacaatattgcaaatttgcatcctgtttacaaaaaaaatgcaagtaagctgacattttttacatgaagttccttatttgacagaaatttatcacagctctcaccctactacatgcaccatatcatggataaataaatatgggagatgaaaagacatgagtctaccttttaaacctaggtacaatggctttctaagcccaagtgaaaactatttaaacacttaaataactagctgccaacaaaagcaaaatggaataaaagaataaatagggaaggtggggaaaattaccgtctggaaataagaacaaaggggttcttgtccctgcccagccatcaattcactacatgaccttacctaattagtgagcctctcgggtctccacttccttactttatcattatttttaggatcccctggaaccacaggccaggatccggcatgtacagcagtgtccaacaccctgactcacattcatgtcacccaaaagagccacatttaactttatagctttaaataccggagtttggatttccatccaaagcaacttacaaagtgtcagctgaccttgtgtccatttcaagtagagaactaaagcaagttaaagtttcgaatttcaccccgacgacagctgctgttaggacagcatttaatagtctccttgaaaaattacacctctttacaaacggagaaaataaaagtgattttcatagtctcagatatgcagctgccccaccccccacccaattcctatgttggccttgttgggacagctgagtagaagggagctggcttgggaggcaaactcagacaaggccctcttgagtgatgccctggaccagacagcccatccctctcatcggtgctcacaagccagtaaaaagctttcctgtaagtgacaagggaggtacatcacagattagcagccaggtggcagttccaaacacctgcttccattctgaaaagagccaataaataggaacctatggctgaggccagtttgattaagctataatttacatttacttatagcttatttaaaactacagtaataaagtacctttggaatggcagtgttggttcagtaatttgcatatcaatcataaacttaattgactcatatatatatatatacacatatatatatatatatattcaacaagcattttaaaatttatctcatagatgaagaaatttagtgttaacaactgccaatgccttcttttgaatcaagcctgacttccctccttcaattttgctgggtgtagtagcaggccagtaacccggacagacagtcatgatggctgtgacaatgagaggccagcctgtctcaaaacaataaaacagaaaaataagtggtccttcttatgccagttttcagtctctactgttttgtctgatttaacaaatagtttcagaaaccattctactgcccaacctccagtaggcacttcctttgtcctcctgaagcataggtacagcgagtcttggttcacacactgataagatcttagtgttcagtgtttgtggtttgcttaggtccccagctacactcatttcctcaactgcagccttactcatctttgtcatgaaaacacacagggatctcctgccctctggcttcccatctgcagcctgccactccttcacttccctctcccactaacagaaagtgccacagagcatgctgagagtcctttcagatgtctggcacacgatgagcgatttataagtattcagttaaaggatccacggcagatggatagatgggtgcattactaataagtatttcagtgcactttataatgtatagacatttataaatgtgggtctcgaaccataaattcaatagtgatttgagtttttgctttctgaaatgtggcacacaactattacgtggtatcctttcagtttcataatggcccacaaatccaccttactttgcccattttcttggtagctgtgaggacaggcgtggctatgcctcctatagtgtaactagggtgtcaccacattccgatttcatgccattctaatgcttcaggatatccactagttacaggctagatggagaagagagaccttcctcaattagccatggaactgctagtgcacagaacgtcatgggagtccaacaaagaatttatatcctaatgtctgtacacacacacacacaaatgcacccagatatacacactcaccacacttctcagcttactctcacccacaggcggacagagaacaggtgatggatcagagttcacttctaaccttaatcttctgtcctgtaaggacaaaagtcagataaacagtatgagacaagctgaatttcaagtcagaagacaaatttccagccccaacccataacgtcctttgaatttagagcacatagacttatcaaaggtgagttatttcaaagacaggagaaagcaccctggcaagctggcctctctttaccaagtgaacagcatgccaggtgaacattctgctttccccagaaatgcaaactcaaaagaactatttgctagataatgggggacacaccaaagtaggacctccagaccagtgctgaaggttcaagcttccttaatctttaggggtatatataattcgtgtttagcggccatttccaacagatgtgcctggttgcagtgggaattcaagactccctcagctgggatggaacttctctcccactctactccctctaaattcgctttttcctggcaagagctctcaagacatctgcacaccttccacatgtgcgacggtgaagcatcgcactacatcactggcacaagagaatccaagaaagtgagtggagtctaatgaaagttcctaaaatactaggcactctatctttaaccccaactgctgatgaaaggatatatatcaaagtctgttttcctaaccttaggcggaggacttaagtgaggtgtttccgctccagagagagggcgggtgacaaatatcaaccttcagtagagggtatgtaggcaattcgggaccttggttttattgctcgagggtagttaagtagtattaagtgctgcccctcagggcactcacagtgagaaccccattctttggaagacgtgcggtgggggggggggggggctgggactggggtccagtgctaaaactggtccccagctttaaagacgcccagattctgaagccttgacttaccagaagtatcagggtcactctaactcaggggaacaggagacaaagatccccccacaaactttacacaggcgcgcgctcgcggacgccaaggctccacaatgcacattcctccgacctttcactgcagtccgcatcccccacgcagcctttcgagaaagtttagggctgttcacaccgactttaaaatgtccattgttaccctctccgggaacgcaaagcgtgcgaaaaaaaggatcaagccccgattcccaaggaccccttttcgtggaagaaggctgagtctcggggcgcacggagaaccgggggtgggggggaggcgccggcgaaggcggacgctgggacccactggatgttgtgcttctccgcaaaaacgccagcgcagggacggccaggccttcgggacgccaaggtgcgcgagtccggtccgcgccctcccggcccctggggaccgccgaggaggcggggctggggacccgcgaccggcggagccttaccttcccctccccctccaggcgtcggtctactcaggtgcctacgcggtagcccgaggagccggagaggagctcccggagtccatgcgtgcggatctcccctccatgtccaggaacccgagacccgccgcctctttgaagccaggcgcagcgcagcccagcctccgccggaggagaaacagtcgcgaccggggagtaacgctcctccctccgcctccgcggccacctcctccagccagcccggcttggcgctcttggatccttccctcctggaggaagaggaggggaatcgccgtccaggcggcgcgaacccgtgcggccctgagacaatagcgacagggcgcgttcccgagccgcgcaggtcccgggtcggcgagcgccacggctcgctagggtccccctcggccgccaccggccacacaagcgccggctccgctgggccgagagtgctgcggattgggcaggcggccgggagcgagggaggcgggcgcagaggcggggcttatgggcgggacttgtcggcggaggggcggaggctcctcccatctcgtgcatcagacgaaggttcagcgcctcccgctgactccagagcgaagggctcacactggcactgcgggcggccggggctaccaagaggcgccctggcctttgctgcagacgaccacctgggcgttcgcgggagccggcttggctgaacctgagtctgcgctcttcagtatccttagctgagcctgaatctgttcccgttgtctcctgctgaccagagcctgtgaccccatcacctacagaaagctgaccacgctactgggcgtccataacctccaggtttaagccggatcctctgccctcatcactcctaacagagtctaatactgctgccctgtcacctcatggtcagtcccccatcaggcgaaactgagcctgcattttatctggccgggccaagctgctgaaccctcattaccaccaccacccatgccccagggttgatttctgttctcttccctcttcacccaaaagctgagatagtcatcatctttgatcgcgcccctaatgaagctgactcggcaccgcattatcccccaatcatttcccgcaagctcccacaccccccccctcaaactttctgagcctcagttcacggcgtctcaactgcccccacctggccagcaagggatctggggtcgcagccctccccgctgaggcagcgtgctcttgacttcagactgttgcgttgggagattggagcagccccagcatctcgttcaagagggcagaataaatatacctagatctggccacgccttctacccacgatattctggagtggctgaaacttgcagcgggcgggatgaaactctaaaagccactcctcagcccatcctacaccaaaatacaccagtggggtggctcaagtagtcctgccaccacctgtcccctcgcggaagttgctcttggagaggaaaggccttgcctacagcaaagggcgcgacctggcttgatccgttagacccacgaggtctggagctaatgacagctgcaagactgccaaatcgggatagtcatcatcctttatttaattcagagctggaagtgttcctcctggggaactgtttcaacaaatactgtacagacgggattgttcatttttcagtcttgcttttttttgctttcgccacccttccagtaaatctcaacccggtaaccatgacacaccagcaggcagaaggggaataccctatttccaacgtttggttcaggacttcgtagaactgaatcagtgtttccagactggagccggtaagaatctcctgagatcctgaaaaacttggattcccccaacaaaactctttgcactgagtcagaggtgtctgcaaaattcaattttggaaccacttccagaatgcatccacaattaactaaaaaccttggaaagatgcacccaaggagcctcttcacctgcttctgagatgtcacagaatccttacccatctgccatctccagccccacccccttttgggggagagaaaaaggacgacttaaaataacagcgcagattgttttctgtgacaaactgtaaaagaagaaggacactttcagtggcttcaaagtgacatgtttagatcttgagacaccccccctgcccccagaggtaggggagatttctgagatattattcagtggtaaagagcatttgcatctcttccagaggacccaggttagattcctagcaacctacagacaagctcacaactgtctctaactccagtaccaggggatccaatgccctcttctgaccttaatggtaggaacacagacacacatgcaggccaaatacacataaaaataaaaataagagtaattctttaaaaaagaagagaggcaggactctctcatgcacacacacacacacacacagagagagagagagagagagagagagagagagaaagagagagagagagagagccctaagagccctaatcctgttaccttctgggtgtggaaatggcatctttgcagaggtgattaggttaagctaccaacgtgagccctaactgcaatcacactcacaagaggaaggcagagagaaatttaaaatgccaccagggaggcagtgacagaagtgacacaacccaggagtcaggggggagagcagccaccagaagcaggaaaggtccaggaagaattctccctagaagctgactgcactagtgaaacgagttcaaatgtcagacctcctgaaacacaagagtcaatttgttgttctgatttatcaattaacaaattgataaatgtgtttctgaggtaccctgcaccctgatttgtgccaaatttgttcaaaatgcctctcttctagatctttattgagcaccaggcactttgcttggagttcagcagttatatgttatataaatcctcccaaaagtcattaagccaataattttggagatgtaacactgaacctggaatgtttaaatagcttgtccaagagtatattcgaattaagaggacccactactccgtagctaaaaatcacaaattcatataaacagttttactagatgttttgatgtaaagagctcttccactgtctgtattcattgccaaaccaaaggacatggatgctgagagtcagtaagactgtcttctgctcagttttcttgtgaaactaaaacttcaaaactaaagtctgttaacagggagtggttggctcttttttcatagactacttttaaaaattttataaaataaaaagaaacagataggaaaggaggaacaaaggagacagcaggaaagcacacagactccgcaccagtgaaattcacagcggttgccagggactcaggctctgaggcaaagtggcaggatgttctttaggcccgtccaccaagtggtacctggaagtagaagggcccagaagcaggtgagagaggagaagctgtgctctcaatgtccaccaccaaccccactggaggctttcaggctggcatggcccagcagaatgactgggtctaaatggtgaggtgtttggatactctggagcggctattggatgtggtccatcctgggaatatcacccacttacatggtatttgttgtccttaccactattatcaaaacattgaggagaaaggggtgctcagcgcatgccccccccaactccccctctggtcatgactatttcttcaccgtcttcaggcagcataactccttgtctgagagttaagatccttaagtcagatggcctgggttagaagccaagtccacagatcactactataactctgatcaagatgcacaacctctctgggttgcatatttgcatttgaaaagaagaatagcaatggtaactagcaggtagagagtcattgtgagattaaatacagaagtgctgttagctgcttccctgtgcaattcataaactcccatcaatttctgctactggcatctctgattttctcttctttaggtccccatgattaggctaaactggaattttaaatcagattaccttcacagtggcttttgggggttgggggaggaaaatggctgctcttggaacccaggccatacctgatggccatggataaataaaacccactaatccctgctgcctgccaggtggatgaaaatgggtgtgcccctgggagggacctcatgctgagagagggagcgaattagggtccctgtgttctgcatgtctgtcaccgcctccacctttttatgacagagcatcccttgactgtcatcccctcttcctttggcagttttcctccagcctgttagaacttagttccttcacagtttcaccctgagaaggtcagatggtcattttagagtggtatagacctggtcatactggttcctgttagcgccagtgagtgcatgggtgtggaaatgattcatgagaaaggtgttgattggccatttccttaattaagttttagaagctgcccgcccccatccactgggtgtaatagcattacagaatgttagtgtgacctttctccaccacggcccaactgtgtgtctacacaccatcttttctttatttatttccctgcgtccagccaagtacattctcacactttattggttctgaggaaggctgtgtgcttgctgttgagcttgctggccatttgccttaacttatgatgtaagcaatcctggtgtaatgaaaactctaacaagtttttttttttcacaaaaaaaaaggaaaaacatgtatgtactctatttaatgcctctacctcttattcgattgatatgaattaaatctcttttattattcaaaaaacccaactctgaggaaaaggtaccctcctacaacatcaaaaaaaaataaaaaataaagtcacatgaaatattttgttgtgtcggtggcagtatgggtatgtgcatgctgtatgaactgtatctgggtggatgcacacatgtgcatatggagtccagaagtggatattgagtgcctccctctatcactcttcttcagcttatactttttacacaggatcttttactggagttggagctcactgatgggctagactagttgcccagcaagcccctgggatcgccatgtctctgcctcccagcactgctgttacagccacacaaccacaccgggccctgtactagagcacttgggatctgaagtcaggtccccaaactgtgcagcaagcacttggccatatcatgaaccatctctccaacccctagagatctttttaagtgatatgttttcctgatgttttctttttcctagcacttttctttcatgacttacacagacacttttacatatgtggtattcagacctaagaaattgaaaagggcatctcttgcagattctcatttaacagttgaagactgctcttggaaatggttatgagttgtttcaggtcactcaatttgaataaagttgcttctatagctttatttataattagaatatttattatatataaattatttatatattatatatattattatatataaatatatttaaaatttagaattaagatttttctagcatatatgcctaagatacatgtagcttcactgttcctttattgtatgtatcttgttaaatctgtaaagagaacaaaaacaaaagaggcatgacatctcttcaatatgctcatatatgcagtatactaagagatttctaataaaataatgaatttttgaaagaatagagagtacttgtttttatatacacacatacacggcacaagtatggcccacaaaggctcatgtgctagaagctagctgcccagggtggtaatgggagaggtgatggaccctataaaatctgaagccaaatggaggatctacactaggctggggaattaatgtagttctctcctatccagactttgaggttagctcctcaagggaatgagttgttataaattttagaaagtggagcttcctgactggccatgaggtctccagcaagagctcctgcctctatgatgcctcctcccccaaacccttaatcagcttcctaaactatgacctcctctctttataagcggtccaagtgctttgtcatagcaaccaaaaatggagaaatccagcacataaatttcaacttggaataataccaatattgtgagtcacgtgttatcacctggattttattccttccttccttccaggcacccagagaagtataaatccactctgcctcgtaaggttaagaatcctgtgttctcttcaaatgggcaaattaggtgcaatttccaggaatgggtcactattaaaattaccccaaaaatgtattatctgaaagctctgcatgcttccctgagtcatcactgaaaaccaatttaaatgtgaaagtcattatagattccctcagtatccccagaccctttgggtggaaaaagagttctccaagaattgtaagctcaccttgacttgaaaaatcatagttaacaaatttttaaagttagcattccagttaaattttaaattaccttttaaaattacttttctacatgtcaccccaagaaaatgagcgtgaaactatttttgaaagacagtcaaggtcaccagcctactatgtgtggtgagccctcacccaaggtccacatgtatcaaatcatcacatgtatgctttcaatattcaccatttttatgtgtcaattatgcctcagtaaatctagatacaaatcacttaaataatactaacaaactaacaagagtgttaatgttccatatttctttgtttcataattactaatatttggttcaacatggttgtataatccaatgtaagccaaaataaagatttaaaatgttctgaaaaaaaaaagttccacatttctaaaaaagaagaaaagaaaggaagaaagggggtaggaggatgtcattcatgacaaaagtggaaaatctgattttatattccatttggatataaaaatttgctagatacagccaggcatggaagcacatgtctttaattcctgcactcaggaagaagaggcaggaagatctctgagttcaaagccagcttggtctacagggtaggttccaggacagccagggctagagagaaactctgcctcaaaagataaaaaaaaaaataaaaataaaaataaaaataaaaaaagctacacaatcaatctaaggattgtcagaaaacctctgtaaaatgtgtaagttgctttaaaagtgagaaaaattttctaaacttttgtattgttgcatcactgccacatctcttacagacgagctacattctgttcattccattctgttcaaacatcacttgctgtttccccctgtgctaaacactgatggattccagaaggcagctggaaccacaaagcccccacatttttataaagttttgtgataagttagcttttgcctacttgacacaaactaaagttacctgggaagtaacttgcctccatcagatgagtctgctgacctgtctagagggtattttcatgattaatgattgatgtgggagggtctagctcaagcctggccaggtggtcgtgagttacaccggagatcaagctgagcgagccctggagagcaagccagtaagcagggctccaccatggtctctgcttcagttcctgcttccatgtttctgccttgagctcctgccctgacttccctgtaacccgtaagacggaataaaccccccccccccccagcttgcttctggtcagtgttttatcaagcaccaggtccttccttctgatggacaaactgggctgagctcatagctcaatgggagagctctttctgagtaagcacaaggccctggattcaagccctagcacttggcaggtggggcgggggcgggcgcggcgggagggggcggggagccgtaattggttatttttctgttgctgtgataaaactccatagagtttgtttggcttactgttccaaaggattagagtcaataatggcagtggaacatgccagcaggcaggcagtaagtatgtccgccagagcaggaaggcctacattctttaccacaatcatgaatcagagaacaaactcgtaagtgtcacaaggcttttaatctcaaagtccatccccaatgtcatacttcctccagcaagcctgggccacctaagcatccacaaacggtgctaccaacctgggaccaaatgttcaaatagttctcattcacatgactataatggcacaaactgggacaaactctctaaacaaaagttgtattgagtaagatagaagatacagttgtaagaaacggcacagggtctcaagaaaacgaccaggcaaaccagtttttcagcaaggtgaaaaggttcgcttctgcagaagggtgcatagcagtgctaaatctagcaagcaatcacacccaattgggtctcccactagatttttattcctaaaccatgaggtcttatgcctcattctgagtggtccgagcttagactcacattcttgcactattggctaatacagagcagcatggtttctagggagaaatgaaacttgagattgtattttgatttcaagaaatgcagaccttggaagaatttgaattcctgccaagtaacttcttcacagtatttcttttttctttttatggagttttgttatataagaaagtcgatgcattttatgtagtttcccaaatattgatggcttctggcattcacatctttcccattgactctggactggacatatacctttcactgccacatacattctatacggagagcatttacacagagagacaggtgtcttggtaggagaaggagaagttgtgataatagggacagggaatgctgctcctaaaatgccatagttaaactgagatccagaggaagttaattagcatgcagaagagaattttgacaagaaagagatgttggcgaaaagggatcgactgaggtctgagagcctggggagccaggcttgaaaccctgtacacctggcaaaggccagctacaaactcttttgcctaacttcagtttgagctgccttctacccagataccgcattgtatcaaaggaagtcataattgtacaactacttttatggacaatgtttcgctctgtgtaaatatgtagaaatactgcttagttgaaaatcagcgataactgcattcatgccatgcatgcctatagctaacacgtgaataacattctgccagagagatcaggggatagaccacagcatcttcactcagctgctggactgagagaccacgtgtggggtaaaaggaccaaatgtatcagagacagaagatccggccatctaaatattccagctgatcctagtcctgcctgccctattgaataaattcagccattaaagtaaccatgcaggaacgttgcaactgaagccaagggaaaaaaaaaaaaaaagggacaaactaaacccatagtgttcatttcctttctttttagaactggtctcactctgtagcctaggctgatctcaaactctctgtctccagcctcagtctcccacgtgttgagattacattcatgaagcaccatcctcaaatcaatcagtacatcttaattagggtgatcttgtgtcccagaaggtatctggcaaccactggaggcagttttgatttttgcactcaaaggtttggggaataaagtgttactggcaattaatggatataggccaggcaagatcctaaatatccccccaccacagaatgaagcaaagactcccccaaactctcaataatatctattatgttaagaaactctgaccttgggctggacagatggctcagcaggtaagagcactggctactcttccaaaggacttgggttcaattcccagcacccacatggcagctcacaactgtctgtaactccagctccaggggatctgacacccttgcaaagcatacatgcaggccaaacctcaatgtacaataaataaataaatgaaactctgacctaaacaaagcagtttcctataatgcttgaaaaggtcattgtcacccagtccctcacagaggttatgctaatgtattttaccaagggcattaaatgaaaatcccatgttcctgtcccttcacctcacaaaaagaaaagtattagtaggtatacagcttattcctatatttcagcagaaacaactgataccatgatcttatgatatagctctttagtaatgaggctagatatattttcccacatgggagtcagttgtagttccgtcatgctcactgtctgtccatatctttgttctctttctttgtgattattcttttttatgcagttttgaggattaaaaccaggcaagcacagtcacttgaaatctccaacccttcatgctgatttgctaaagatttacatgtatccctttgtttattactttagacgaaatgatgcactgactgtttagcaaacagacttaaagtggtaaatactggaaaccaaactatacagaggaaagtacacataagtgaaaaaatatgtttgcatactgtaacttgaaccagtgaaagaaactaacaaatgctgtgtagaagaaaaaaaatactaatatttgttgccaagaaccatacagtgaggtacaaagaacaggcatgtgtgagcggaggcagatggactacatagctcaaagagagcacaagaaaagtcccttatgaggccaggcagctgagaatctgagagactgaatttcaaaattcacaaaactgcttaaaagagttgtgagacttggcaaaagtcatactcaagtttagtctcttggctaccctttactttttgacccctgtgacatttatttctctttcagccccatttaatataaaaatagccaccatcccatagctcagattcagtcttggctctagtggggactagctgtgtgactctgtaggagctgcttaagctccccatgtctccacataatcacctggaaaatgagaataatgattcttggcccgaagggcagtgaattggcaatcaacatgaaaatggggagtgagcacttaaagttggctaatactcttatgcacaccaatacatgtacatgattactctgcctctaacaaatagcataatatctgaagttttaatctcctgttgagagtacttatcctcatttcacagatagactgaaactcggagatagtaagactcattttcctcatcaactttaagttgtctgcaatattaaagaaacagctatctttacaaggtgtggtggtttgactgaaaatgcccccatatgtccacagggagtggcagtattaagaggtatggccttgttagaaaaattatatcacagaaggtagacttgaggcttcagatgctcaagccaggcccagtgtcactcttcttcctaatacctggtaatccagatagagaactctcaactacatctccagtaccatgtctgctggcaaaccaccatgcttctcaccatggtgataatggactaaacctctgaactgtaagccagccccaattaaatgttttcctttataagagttgttgtggccatggtgtctcttcacagcaacagaaaacctaagacaccaggaaacccaggagaacaagaagtcttcatcacacgggcagttgagaagggatcttcaagtatttgaagattcattgtgaggaccagaaactaaccttgatctctgcagttgatcacagatgtgctgccagcaaagagatcaagggatgcagaacttggttctgtatcatttcacttgctttgttttctacaaacctccttcacatctctgattgtgtgtctgttgaacaaatggatgaagcccaagaaatccaagttcaagtcctgactcatccattaactcattcttcgcttcagacagatttatcaattccttcatgcttcagtttcaccacacataaatcaatgaaatgaaatctaataatttcccaatgggacaacatactatttaaaaaataaaaaatatctgccaaggtacccagcacagtcttggcactacactctactccctcccccagatcacacaataccaaagccacatgtgacagctggagttgaacaaataaattcctcacttcaggagctagagaatctttgtctcagtggtgatttttgcttgcttttgttgcatggggcctcacattcccacttagcacataaaacaaaacttgcaaataaatagtggcacatatactgccactatgagccaagcattgtgtgtgtgtgtgtgtgtgtgtgtgtgtgtgtgtgtgtgtgtgtgtgtgtgtgtgtgtatgtgtgtgtgtgtgtgacaacagaagtggattctgttggtccttgccccatccttaggaaataggtatcagtcgaagaactaagacagaacagccagtttatctatagaaaagtgtgcaggtagtaagcaccagaaatatgaacccagggagtcttgccagttaaacacttcctgaaccacaagagaaaaaaacaaaatacaactgcacacgatctccagtgtgaaggacatgtgattgtcatggggcagaagctggtgtctttggctttgatttcccttccaggaagcacaggcatcccagtcgggtgtggattcgagcttgacagagagtaccaagggattcgagcttgacagagagtaccaaaaagtaagctggacgtggtcttatgccaaagagagagaaatcctgctgggtggaatgggacatttctcctagaccacactgctcagacaaagtcatgaatttggggcccttggggtcactgtgtgacatggggccctgatgtactttcatttacacaggaaacaacactgttcttgacacagttgctcactgtgtgcaatgcagggatggtgtcacatggggagagtggggaggagcagacatgagagagctgattctttgtgccatcaggttgccttccatcccgagccctgggggggggggggcaaacagttcagactgggtgcagcagaggatgggctcccattgcacatcttgacattttggttgtgagtctagcttttcacagctgaaccatctctccaacccccaccacaatatctacaaatcaggtttttaaagttttagcatcaggtttcatttggggttggatttttaaggggcaaatgggaagaaaagggtaaagtggtctcagcaggactcttgctctatacttttagaagtatttagatgtgatattataccaggcttgttctttggggataccaaccagcttccaaatcatgacatgaagactaattattagttatgagtgctcagcctagctctggctctttcttagctgactcttttaacttaacctgatagtctttatctaccttttgcctcggggcttgttctctttcttgcttctgtatatcttactttcactgcttctctatgtctggctgattgatgactgcctggcttctggcccggggcatctccctcactctctcctctcttcttctactctcattcttctagattcctcctcctatttattctctgcctgccagcaccacctattctttctcctgcctcgctattgaccactcattttttagaccaatcagatgcaacacattttcacataactaaatacacatttttacatgttaaacaaatgcagcataaacaaatggaacacactttcacatagtaaaagtaatattcttcggcctaaacaaatataacgtatctttacatagtttaaatattccacaacatagtatcttgtgctaactcacaagttcgatggttaagtctttctgttgaagaaaaaacaatagtgccagcttgctgtgcgcttatcagtgaaaagaatgcctgtgcgaatcatacactttctggaatgcacgagtgaactgccgatatcgtcccacaatgacagcagtgaagaccctgatgatagctaacactattcagaactccattcagcttgttcctaaggagaaaaacatcctttctttttaaattaagtgtgttttggtgtaattagcctatgtggtaaagacttattccttgttaactgtctcaacccactccagattatcctctattgagggcagaaaggagggaagagagtaggagagagcagttggaattctgggaaaagccaaattaatatgtgctttgcatccagactccaaccagtcaaagaatgtcacatttgtgaccaagtgaaaatacttgaacatggaccaagaattaggtgtcattaagggatcattgttaatctagtcagacttgaccctggtaccatagttacaaatgtcctgatggccatattttagcacaaaacagaaaatgagacatctgtagcaatgtggtgataattactaactccaggttgtgaatggatgaatgttgattttgctattctctatttttctgtatgttaaattttccacattaaaactgttacaagtcacttctttttttcttgaatgcccttgtgttttattttgaattcttatcttttacttcccgttcttttatagaaagtttgctgtatatgagacataatttgaagactaagcctgatcccatattcgattgacattttagaggtatatctttgataaaattccaacatgtaactgttgggaagatgtgctccagcctcattccttcccatcagaaagcccaccaagggtcagcttcccccctcccccgccccagagctgatcaagaccacacctacagggtatttaagacccatctatgggctggccatgtgctctctctcctgccttcctgagagtcacccaggagtgctctgctttgccttgccctgcttattaagtctggtcttattaattcagcctgatctgacctattgcttcagcagagaaacccaataactgggaatccaatacttatcagtaccacatggggaaaaaaaaaaaaaaaaccactaaggcctttttccttttcatttatttgttctctctcacacattctctctttcttatttttgtattatcaagtgcttacaggacaagtactcaatgacttagatcactgagctacatctgagctatgtatgcccctgtcctctttatttagtcatagtcactttttcttcacatttagatttgttttgtctgaatcactggaaaataaaatggcagatgtcattccctttaatacctaagcagtacatctcttgggaacaaggactttaggacacagcataacacattgtcaaattcagcacacagtacacattcaggcttcatcagtggcctctccaatgtctccagtccagaactcaggatccaaccaagggttgtgtgtctcacttgtcatgtcccttcatgactcttagtctaaactagttaagaacttctctgtcttctatgacataagtgtttaaggagcacaggcattgttttaaataatgtcctttagtgtaggcagaaaagccaacgactgttcattatcaaggcttctgtcaattcaacctttctcttttgtaagaatagctctaactgttttataagaaaagataaaataaactgctaaacctgaaaagtatccatgaggagcattattctctagaggattcagataagcattgctaatgacaaaaattaactgaataaatttctctgccagaatatgctttaagctaggaaaaagataactaacagccaaaataacttaatattaaaacatgctatcaagggaaccgttagggatttctgaaagttcgagtctcatttctgttaatttcacttattttgaaccttgaagatatgagtattttatctatgtaagacttatttatgcaaaagcaattaaactatgttataatatagggatatctgccataattggattcttagacaaagtggtgaaatttagagattatccccttcaactcatgggttttttttttttgtttgctggttggttggcttgtttcagaaaacaagacccatatctaaatgatatcagacaagttcttgtgatatttgtacaaggcagctcactcagaactgtttataagagtttagaagacctcccaacctccacacagattttctatcctcatttactcatggtgtaaatgcacatttagtaagacacccaagagatgggaagtagaaagtaagattctaaaatagcatacacaatagaatctcattttataaaagcaagtgcagatggttatgtgtgggtgtagagtagagttgggagataaatacaccaaaatgtcagtagtggttgcctctagggaacattagaattgatttgacatgatttgtgtgtgtgtgtgtagggggatgtactgggttgaaaatagggtttctgaaatgccagacaagtacttcacactaagctgcacatgcaaccataaactgattttttttttcctttttggtttttcaagacagggtttctctgtattgctttggagcctgtcctggaactcactcggtagaccaggtaggcctcgaactcacagagatcctcctgtctctgcctcccgagtgctgagattaaaggtgtgtgccaccaacacccgggtcattaactgaatttttaatcttagtgcaatgagaattttggagtgttttggttttgtttggttgtgttttgttttgttgatttggagttgttgttcctcccctctccccattttattgttttgttttgttttgagacatatgtagcatagacaggcatgggacttcttatgtaggccaggttgatttcttgatcctcctgtctcaatcttttaattgcctggattaacaggtgtgtgccaccatgtgcagcctgaggattcttacattgatattacttcactaaacaggaaatttcaagaagatgcagaagttgtttccttttcgctttccccagtggatattaatcaccatcaaaagtatgctgggcaatgtttgaaattgctgctggaagaactattcctaacacccagggacagccctgcatacctaacagcaagggaagtgagctcaacagagaatttaacaatggttcagtcatcaccaggaagctttctcctgcagtacatggcaacaaatataaagaccctcagctagacattaggcagagagtgagagaccatgaaatactcagtcctaaatgggatgtctctatcaaatccctgcccttggagctctgggaaccctgtgtaagaggaggtagaaagtgtataagagccagaggaggtagaggacaccaagaaaataagatctctcaatcaacatgagcaaagttcgtatgaactcacagagactgaagtagcatgtacagggcctgcatgggtctgcatcaggtcctctgtgtatatattatggcttccagcttagtgttttttatgagactcctgaatgtgcaaatgagtgggtctcagactcttttgtgctttctcttaggctcttttccttccattggtttgtcttatccaacatcaatgtgatagtttttattttatcttattatattttatattttttaatgaatgagcacatgaaaacctagccacaagggtaaaggttaacaactgaactgacatgtattcctacttagagatggaaaaacagttttttccaataaaatgacactgaatatgtcagggcagtctttgtgttcaggaataactgttgaccaacatataatagactacacagactttttgttttggggtgtgtgtgtgtgtgtgtgtgtgtgtgtgttgttacagttgtctagttttgtggagaggctggtgttttattttattttattggtttggggagctttgttgtagtattggatttttgtttgttttttgacaaagaatttaaagttcggtgagtagggaagggaagaatattatcaaaatatatttaaagttaaaaattgttttaaataataaaaatataacaaaacaaaacttttattaaaaaaaaagtggggttatacagaagagattggactctgaagagaaacagactggacctccatcatttgagaaaggttttctttgtatggattgtggtttgtgtggaggggagctggtgaacagatgaacagaaaaatggatgcagatggataaatggtggcttagatgtgcttaaatatatatgaacaggtatggtggattacagtgcaaaggactgaagatggatggggtgagtgcaatagatagaagacctgggttttcgtgtgttaatatacaaggcaacattcatagtaaccatatttcttcatgttgctgacactcctgtgggaaaatccagaaaacttcagggctctaccagtcctgaacatttgttcaatcaattgtcctgtgtcttgaaaagcctccaatcacctttggtgcctgaaagagtagatggaaagcaggaaattgactgcaatcaaccattaaggaattaatttttttaagaaagggtttctctgtgtacccctagctgtcctggaactcattctgtataccaggctgaccttgaactcagagatccatctttgtctcctgagagctgggattaaaggtgtgagctatcacctcccagctaaggaactaattttttggtttttttgagacagtgtatcgttgcttcactttggctgttttagaactctttgtcagatcaggttggtcttaaactcacagttcgatgtgctggggttagaggcatgagccaccatgcttggccatttaaggaatttatgatctccatagaaggtggtgggtctcctttaaaaatctacagaaatctacaatttatcccttcaaatcaaagtaaataaaaagcacattattctggcataattctaatattaatttccagatctatccattgacaactctgaggttcaccaactccagattaagaaattctgaattacagagaattaactaagcagggttcataagatctcacagagactaaatcgacagtcacagagcctgcatgggtttgagataagtcctgtagcatgtatggtatggttgtgtagcttgatgttctgatagaattcctaccagtgggagtgggggtgtctctgactcttttgcctgctcttggaaccctttcctttgtgtcatccagccctgatatgaaggtttatacctagtcttattgcaacttttgttattcgtttggttgatatccctggcaggcctgctcttttctagagagaaacaaaggaagagtggatctggggagaagggagagggagctgggagcagtggaaggaggagaagctgtggtcaggacataatgaatgaaaaaagaatttaaaaaataaaactagattaaactgtagcaagaattgactggtgctggtactaagagactgagttggcctgtgaaattttggaaatcatacctttgtattttattgacagaaagggttctgacaattttaatttagcttaactaactaggaattgaaaataagagaaaaaaagtcaagcagtttcatgcacatctataatctcaacaattgggaagctaaagcatgaagattttaagttccaggccaatcttggctacatactgagaccctgtctcaaaaagcaaaacaaaaattagaagtctctatttttctggttgatattttgaattaaaacaatgcctttgagaataaataattcaccatagttccaaatgatcaattaaggacaagagttcatgattccttacaaacacacaaagaaaactacattcatttattaacaagtctattgaattcccagtgtatgccaagccttgttccaggagctgaagacatgacaaagaacaacactgacaaagtgcctgccatgtggaacctactttttcactgaagtgaggagtgaaacaataaacaaatgttatgtgacatagtgtcatattataatatgtgcccaaaagaaaaatacaataaagaaaagacagcaatagggaggccatgtgccaggaagcagacaggcaaacttaactattcatagggctaatcacagctgagctgaatctaatatctgtgacagcgaatagtaacatggtctcaggcatgtggtaggcaactactgattttttgcaaatatattcttttctaccccagttaggaaatgagaaccaaaaattgttgaattttgtatatgttgtagataatgatatgccccattgtaattttccctcagggcagtatagccttgtagccctctaccataatatagtacaatgaaatctggaccaactaaatagctcacaaaacatcacattagtgacattgtgtgagcaagaaatggctagcatactaaaggctacagtaagagacctgtattccagaaaagtggggaggaaaccttttatgtccataaaatttcgaggatcccaagagtgagctgtatgctagagtaagtgtccaaagtaagagttaattattgcatcttgcatgtctcccagtgaaagaagtacaatgcctctagggcctctctgggttcggaaggcaacacattccatacctacactcatggtctggacctgtacacttagagtcgacaaaggctgcctgctttggatgaggccctgaacaggaaaacaacaaacaaacaaacaaacaaactgtagatcaagtcaaatctgcaatggtaacagccctgccatcatcaaggatgtcatctctgtgatgcagccaccatgtagtgtgtcaactctatgatgtggctatcatgtagtgtgtcaactctgtgatgtagccatcatgtagtatgtcaattctgtgatgcagtcaccatggactgtgtcaatgctgtgatgcacaagagttgcatggagtaccctttcaagtactgcttatgagccagcccttgagctgagccttcaccagactatgccaccactttgctgttgtggcagctggctggcctgccatatgataggagtcactgtcaaatctctattgctatcaccaagtttcttttctagtacaaagttacacagggttccaggctaatatcccaagtcctcagaaaggaatcattccagaggcccagaattgagggaaaaaaaaaatcttactcaaaatacttgtctattgctgacaaaacagcgctgtgcaagacaaaaggagtccagtgcggtcaccctcttccctactctctgttctggcagatagacactcttagtaagttcacactcacaaagcttgttcctggcataatagctttcatttctgctaccatggccccttgattcacacattcatcatgccagcagtggaatgacatggctagctgccatccaatcatcctggtaattttgccttgtgagctttccatgcctctcctgtgatgttctctggtggaggttagcatttcttcaatgcctccaccctcagccaccaatccttttcctttctaacctcctggctaactcatcaagctttttgcccatggagttttatgtattttaaccctaagctacgtgtgtttccatacaaaatggatgcccaggtgcacaacgacaagttgaagtgcctgggaggctttttctttgccatatctctgtatcacctctgaatgctccacagacaaactaccagtcatttgcatctcaccctcacttacaaagccaaagcttttcctcttgtccaaattgttcacacagaatccctttccagccaagagtgtgctctggttggggaagattactgaagcaatgtccctttgagtgtctgggctacttactcctcacacagtttacttgtcccatctggccctcctaatgctcaagcctagatgtctcccttcatttatagcaaactaatgctgtgatccccttaccttatgattttgttgatatgccttagctggcaacaaaaagtttctcagcttagaaaccataaaccgggttctgtctctgtcactgccttgtatcaaggaaggagtctttttcaaggcatgattctccactggagataaagtgcccttgctgacaactcccaggaccctgacgcatggttttcttattacaaaatccatagggcatctcaccaccggtgccagcaccatctgcaagatcacatggcctacgagacaagacctggacagactacagaggctttctctgcactcgaccccctacacatctgactctttctcatcaccaaaatgttcacatggctttaaattgtcatctattgccaggcagtggtagtgcacacttttaatcccaggactcgagaggcagaggcaggaggatctctatgagttccaggctagcttggtctgcagagcgagttccagaacaggctccaaagctacacagagaaaccttgcctcgaaaagaaaaagaaaaagttatcatctgttttatacaaatgtagtggtgaaagcgatgaaagctggaggaccctgtcagtgttatttgatttctatgtaaggcttcagtctagggaagcaagaataaataaccccctcaaaaccaacttggaccactttttttctgcgacatgcaaaaaccaggctctctagttgatcagtcaggcatgagcacttaaccttgacaagagggaagtatgttctgctgtcctcctgccttgatctcaaatgagctcttgtggatattaatacattgcatatccttaaacacaggaagtagctgaagcctgtttgctcaaaggctaataatggcacggtgttctccccctccatactcagaagctatctgagaagatgtctagctagttgcataaatttttcattgatgcaaacccaacagaagggtctgaagatcatataccattctaacaattctaatgtaaagaaacctcatacttgcagttattttcaagtcttgctattgtaggctaggtaggctctggtggtgccatattgccctggctgatgttgattgttttcttacactggtgtttagggacctgggtttgggatgattagttcaaggtcctgatttctgagtttgtctttgttgggtgggtgttttgttccttggtttctgtttcctctgttcttctagtctttgtggcctgggtttctggaggccagcatgacctcagattcagtagggagtttctgtctctgttctcactgctgtggcctgcacctgagcaggtgatgtctgcaggagttgtggggaagggctgttcttctgactggtgtagcctgcacctgagccacaggagtccactgaggtagaggcagggcccagtagtagtaggggtgatgaagtgggggagtaaggactttggtatggactttggggaacagaatctggacagtgggcctttcagctggcaggcaggtcactcatctgttcttcttgacttgcttgcagtctttatttatttttggagcagagacattttaatgaatgtattttacaaacacactggagaaccaagcaatgccgcctgcattgtatacaatcttgggccacaagtctgcacattcctttgcaactggacctgtggtagcagaacctttcatctcgcctttaatgtctattatgacccctgcattgtcttcaaaatagagaaacaccccatcttttctcccatacagccttcgttgtcaaattaccactgctggaaggaccctttttcttagttctggtttgcctttcggaactgtgggggtcacatgttggccacaccagcagtaggaagtctgttcagttgtcccttgattgtcttcactaacatgataaacagaattttggctcctgtgttgtcagcacagttaatcacagctcctaccgcagggcacaggaaaatctacaatgtcactccggcgggcccaccacatccttgcttcaacatcttgaacccccagaaagagtcagaaaagccacttgcagttattttcagagaattcacttgagaaaatgttcagacaagttcagggttggataatactattttctgcctcctgtgttttagcatgtgacctaaactgaccgcagcatcaacatcattatcatcgccacagcatcagcataatgctattttcttctgtccagtctttttatttatttatttattttatgtgcattggtgtgaaggtgtcaaatctctggcactggagttacaggcaactgtgaactgccgtatgggtactgggaattgaacccaggtcctctggaagagcagccagtgcgcttaaccgctgagccatctctgcagcccctctgttcagtcttttagcaagtaactccaacaacacaaatgagattgctatcatttgtttattgccatttattactattgcataattctaactataatcacatttaatacttaagaaaacccaataaaggagactgtgagagtcccacaaggccattcattcccaggtatgataattgctaagagtgccttctacataataattatcatagctatgattcatttcagtgaatagatacaaagaaaactcagcaggggaaaaaggtccacggctgaaagccagaggtaaccaggccaggcctccaagagtccaagagtatgtgcaatgtgcaatgagtggtaacagctaatttgatgtcttctgccaggcaagctcactagagtctcattgcccaggatttttattggggaactgaccacgcaaacgccagactctgaagagtgcagactctcaaaacaaaatcagatgttcaacataaggcatgctgtttgcataaactgtttagatggtctgtggagtccttatcagagaatggtgggaacctttccctaagtcgaaatattttaaaaccaatattaattcagacactctcaatggggtctcatgtaacccagactggtttccaactccttatgaaggggaggatgatcttgaattcctgatcctgccacctccaccttctaagtaccgggattacaagtattatgtggtgttgaagataggcccatgtttttatgcttggtaagtgtgtggcttgcatgagaatgcccccccccatagattcttagtccccagttggtggcactgttggaggactaggacatgtggccttgttggaagaggtgtgttaatggcgatggagatggagattacagaagtctgtgctattacaagttaattcaatgtcatactagaggctgtgtaagtatgtaagctgtcagctcctgttcctgctgatggtcatagactcacctatgaactataagccccaataaattcttctataccttgtcttagttatggtgtctgaccatagcaatgaaaacataactaagacagtagacaagcattctaccaactaagctacatcccctgccctttgtttgtttgacatagggtcttactctattggactacctggctttaacttcaaagcaatccttctccttgccctcccaagtactgggattactacatgagctgcagtgtgtagctcactttcacatgttttttatgaatgaaatcttttttatatggctttaatttaatgtttgattatgtatgcatgcaatatcagtgatggccagaaggggacattaggtcccctcgagctggtgttacagccagttgtgagataccatgtgggttctgggaaccaaacttgggtcctctgtaagaacagccagtgttctaaccactgagtctcctctccagcccctgaataaattctttcactgacagttatatctgttcacagttatttttaaccatagaaatctatgggtagagagaaaaggaatagggctttatttgtgcaaaggactgtggttttagttaaggcagtcaggtcaaggactgcactgctaaactatacccccaaccccaaggaatctcaacattgctcatttctaaaacatttatgattgaaaagtaaaacattttggttgtatacttttgttaggtcctttgcataattgtttgttttcactttgaccagtgatgtgaaaaaatagtggtgcagcccagcaaagcttgtgatttcttcttaggaagtttaaacaatacagtggttgaatcactccatacacaggcgttaaatgcctagtaaatgttttcatgaaaacaatcataaaagtcattcagtgataacggacagttcattttgaaaacactctactatcctttaaaaatggaaagctggggctcagaggctaagggtacttgttgctcttgcagaggacttgagtttggtttccagcccctacatggtgtggctcactactatccttaactccagttccagggtatctgacaacctcttctgacccccatgggcaccaggcaacacgggatgcacatccatatgtgcagaaaacaacacacacataaaataaaacatatccagcagaaccagaaacctgttccttcccttcagagaagaagtatttatgcattgttggcattgttcttatctatgagggttgggcaatgggaaagtcatgtaaaaacccaggtgacaaatattgaaagcataatgttccatctgaaatggaacaagatgccaggaaacaggaaagctgaacatcagatgagaccttgagaatgttggcgctgggagtggaggttgtgatttactggtattttcttgtaaaatttcccagtaaaatctgcttagttggcatgtgagctgctgtagtgacagaatcttgagaagagattatgggcagatggccctaacacattttaacttggctaaagattatttctttgagggaaaactgtgacagtatacacctatctcagaagaaactagtgagtttcaagatttagactggcctatgtctttactatgtttccttatgacccaggaaggaatttattactttatgatctaggacagtggtactcaacctgtgggttgtaatcctttgggggttgagtgaccctttcacagagattgaatatcagatatcctggtatcagatatgtctattacaattcataccagtagcaaaagtacagttaagaagtagcaatgaaataattttatggttggtgttaccacaatgtgaggaactgtattaaagggtcacagcattaggaagggtgagaaccactgctgttggaagcagtttagtctgctttctatcttttctgtatttcctgatgtaaggaattcacacgggtctctgtctttccaatatttcctattgactcaggaaggctgctgtgtaaataaatgtttgctgagagttggggatttatgagagcagtaagtgaagagatggctcagaggttaagagcactggctgctcttccagaggtcctgagttcaattcccagcaaccacatggtgactcacaaccatctataatgaaatttggtaccctcttctggcatgcaggcatacatgccagaacactgtatacacaataaataattcttttaaaacaaagagtttgcttaaataatttagaatatttcactgcaagttgtaaaaggcatttgaaatttagagctacataactttggagttcaaaactttgtccaatactggtgagctctgtgctctgggatatgtcaagttctctcctaaacttctttaagaagacactattgtctgttttcccagtgtggagtttttatgaaaaccaaataaatttcaaatgttgaactatttcatgaacatttcaatatatggtaacatttcatacacggtaatgatacttcatactgactcagtgaaggccttggaatgaagggaaacacaactcctgtggggcaaggagtattgatttctatgtctaagaatgaattaattaagaactggattagagacagaaacactacaaaagccagaagatggggaagagttttgtgaaatgctgtcttctggatgtgacatgaccgaagcaatcgtgaactcatagtatctgtggttacctgcacaagacctgtacaagatcaaaccagctgaaattacagcatagacgggctagatacatccagtgcccaccccttactcaggaactgtcagcactggatagctgctatgggaaagaagactcgtgtccttttgaggatgacaccactggcagatttctcaggatgttgtgcatgatcccaaacccatacacataagggcagctctaactgaacttcatggatttctttaagacatgaaattggaaaggggccatcgcccagtgatatgatcatattttattgtacatatatacatgacttttttaaaataaagagaaaattcttaaagaattaaactagaaggtatagaatacaacaacaatccatcaatttaataatcactacaattctggaaaattgctaaatttgatatcatttcttttaaatctagcttctttctatgatagccaaggaacatatttccccagggtctacatatagaactaacacagctgtggttcaaggggcccagttgtaaatccatcaagcagcagaacttggcaggattatcagtgcagcactggttttgaaaacatgaaggggagccaggcagtggtggcacacgcctttagtcccagcactcaggaggcagaggcaggcagatctctgtgagttcgaaaccaacctggtctacaagagctagttctaggacagcctccaaatccatagagaaactctgtctcaaaaaacaaaataaaacaaaaaagaaaatatgaaggggtcatgaagaccagccaaggcctggtgatgtgcagcaaggtaggaatccttgcaaagaagccccaagaagtcatctcatgaagctttgaggatgaagctccagttactgtggagaccacaggatattgtggatgccagaatcatggttcatacaccaagaaaggctacatacatgtagtggaccttaggagacaatttatgtgtgttgtgggaggcagaattggaagggtagagctactcaagcctttgaagccctcttgattacactgagttccagtgttagacacagacctgcaagaattgttgcttggtccggtggatttttggctttgttttgctttgatcactcctcagtttgccaaaattcttccatttggaatgggactatctattctgtgccattgtgttttgaaagtaatttttttaaaaatttcacagacattcacagttaagagactttggaactgttgcgatgaaattaaaggcgtgtgccaccaacacccatgttgtgatgaaattaaaactttaaaattatgagttcacttgatgatttaaattactcttacactattttttatttacttttaataaaggagagattgggattggaggaacaataaatagttcagcacttgtctagcatgcacaatgcccggggcttggttcctagcaccacaaaaaaacacttggtgaccattcagtagcatggtccacaggactaaacatgtgactgtaagatgcaaagacttggccctgaaatatattgccaggaagtatggacaaaaaaaaaaaataactaaatattttccagtattttaaactattcaaattattaacatgttaggcctcagtttattttcagtacttggagattttttattcatttgtaatttaaagatatttttttgttgttttttatgtgtatgagtattttgtccacatgaaggtgtcctgcaagcatgactggtacctgcagaggccagaagagggcaccagatcccctggaactagagttagggatggttgtcagccaccaggtgggtgttctacataggtcctctgccagagccagacgtgctcttaaccactgtgcccaattcgttccagtcccttgatttttatttttttgcatttttcatacagtgtaattgttggtttcacaagtgaactagtcatgttccatctttgttttgtatgggagtatggcatgcatgtgtttgtatgcctgttcatatgtatattggcacacatgcatgtatgtatacatgcatatagagacctgaagtcgatgtcaggagccttttttgatttctctccatctagttcactgaggcaggttgtctcagttgaaacttgaatcaatatacagctagtctagttaatacttttagcttttttttgtcttgggatatttatttttatatacatggtacataattggcttgaatcccttggtaacaggagagcaagccatcagtatatcagatcatcataattacatggaaaatctctttttgagcatatgttgctgttttctgtctgttctatgatcaacagtgtcagattattttgttaagagcatgaataaattttaaagtatgatatatttccatttatacagcatatttttcattccatgggaacctaaaacagatttctgcatagaacatttgttctaagattattattttttatatcaagcttttgatcattttaaaatgattttccctttggaaagctaaaatagttacgacttttttgtacattaaaaagtcttcaagatttaaaaatttttcccttaccatgaatactctttcttcttaattatgcaataaatagaactatgcaaaagaagttttggtttaagaatacagggcaatataaaaggcttttattttctcttgttccaaagaaattcaatatagtgttttaaagaagttggcaggggcacaaagcagggtaaggagagccctgtgccccagtttcaagtgtttgaaactcaacctgaattctaggctgctcactttgtgtgaggtttaggctttgggtctagaatattttacacacataaaaagagcattttaaaatgtttcatagtacgtttttagaaatgaaagtaagacagatgccccaaagaaggtaagcaatccatgatgaactgtgacattagaaacatagagcaacttcttcatgtcccaaaacgtggtcctcagccatcacagacaggattattcccggccttattgacaatgacactatggaagaaaaatataaagtgaaggcccctttttgttatattatgtatttgtaataactgaccacaggtcacctctctaaaactagttaattgtcaaatgattttaaatatcaactttgaatttgtcccaatatattcacaccggtagagaagacctaggaaatcatactggtaaagaggaacagagagcttgatttttaaacagaattgaggatctgttttctttatacgggaccaagtacaaggccttgtatctaagctcgtggcatcacccaacttactctgtaaatgagtgaaagttcaaaagctggtacccatggagatggccgttcccagatctatgtccaaaagaatggaaagtaaatattcaaaccccaggtgaccttttctgttgttgttttttgtttgttttgttttattttattttttgagacaggctttttctgtgtaacagccctagctgtcctgctaccagctctatagaccaggctggcctcaaattcacagagatccacctgcttctgcctttaaaggtgaacaacaccgccgcccagctcaggtgactcatcttaagagtggatttcccagtcttaagttgtagcatcagaaggataggttgtctcaccaagaatacacctggaggatgttatgtgtcttggctgctccttttgcagtcatgaaattctctgacaaaagcaacttaaggaagaaagggcttattccagctcacagttccagggtacagtctattcctggtggggaagtctaggtggcaagatcttggagcaggtggtcacatcacatccataatcaaaacagagaacagtgaattaatgggtgatcttcccatctcaatactgtctagagaatccccaaaggcatgcccagaggccatgaatcccaggtgactgtagattctttcaagttgccaattagtgctaaccatcacattattacaattaaaataccatcttaagacttgaagattttaaatacatgaggacatttgacatgaatgaatagcatggccccacagaaatcatcccaagagctactgtccttcaatctttctgggttttgttttgtttttgaccatgaactcctgatctcctacttctacctcctgagtgctggcattacaggcaggcatgtgcttccttactcagttttataaggtgctgggtgggcggggattaacttcacagttatgtgagaattctaccagttgtactttgtctgttgcccctataataactcttttgatcatattgagctgaatcctaaccatgcttgtatccacaagagtgatgtgagtttaaaacaatcattacttcaaaaagaaagaaagttagagaagttctttctgttgggagttctaatccttgcaacagactcaccaaaggcaatcgcactgcacagagcagtagaggagctgcctagaagaaatggcattggccatttctgctttccagcagtgaccctgtactactttggaaagtatgaagactactttagaagcaaggttacaattatgaggtcccttgaaggtttaaagcacctaccttcgcaatgaacgtgtgggtccactttagtatatgatgggagactgaagaaggttagtgtaaaattctcctggaaggaaaaggatgtattttataagtagtagatgaagtcacagctgcatgttgtttaaaacatggggaattctgagcctggagagatgactcatcagtaagaacactgcctgtcttcagaggatgcaggtttgattcccaggaaccacatggtgattcacacatgtctataacttcagttccaggggataggatgcattcttctggcctccccagcactaggtgtgtacatggtacacagacataagtactggcaaaatatccatacatatataatgttttatatattagaaaatcaatggggaaattttggtgatggtgttttgttaattcaataactatctgctaaatagtaagtatttaggatgtgtctactttacactgaagcttaagataagcagctaactctcacaccagtcaggtgtttattgtaaatcaatgtcttatttgcaaataacctttattatgtacagctaatctaaaacaatttaaaatgtaatgtctggatacttaaaaattgtaagcttccccctccccgtgaccctatcaaaatgatgctatttagaaaattttcctagcaattttgtgatttaagaaggctccatggaggctgggaaagtagctcaggcagtcaagtacttgccatgtgtgcatgaagatctgatttgatcctccacaccaacatgctcttgtaaccccagagcaggtgatagaggatgctgtggtttgctggctagccagtctaacctaatgagttcctggccagtgagagaccttgtctcaaaaaacaaataggttgctgctgagaaacagcctccatacataggtgcaagctcaccattccatactctctctcattcattcattcactcacacactcaaaatgaagcccctgtggtcatgtgactccagatatttctggagacagctgaatacatagtttaataaagtggatatgagtgcatgcagcatgatggacttaacagcatggcatccaagttgcttgcaccatgggaccacagtgcactgccgtggccaggatgggtagcagaaagactaaaagaacttctcaatagaatgtctggaaaagcacattcatatagcatgaattctctttggtcttaataataaaaacttggagtcagctatccagggattagcaaagcagccatccactagaattcttacctctaccaatgctcagaccaaaggggcgatcctgtcctcagactgcatcctcagactgactgcctcagactgactgctcagactgcatcctccgactgactgccctgccttatattcctctctctgcctagccataccccttcctgtctccacttccttagtgctaggattaaaggcatgtgactcccaagtactgggattgaaggtatgagccaccactgcctggctctgtttctcttttagactggatcaattttgtgtagcccagggtagccttgaactaacagatacctgtcagccactttctcccgagtgctgggattaaagctatgtgccaccactgcctggcctctataactaactaatgtggctagccctgcactctggtcttcagataagctttatttgttacagcacaaacaaaatatcaccacatgttcaagcagctgatgatactgagtgtatcatgacattgggctgggtcacatggatagcctagaccaggctggaaaatgaagcctgcacaatattataatgaagacaactgttggcaaaggtttaatccacttgtaaagttacaaaattacccattggaaatagagatggtggcttatggaagcgtcacagacaagtgctttgcattattttagaaacctcggacatctgctcttaagtgagcttcctggaagatgagaagagtgaaatattgtctgagccattaagacggtatggccttctctaaggtctggtgacacctgaagtaggaccatatcaatcaggaggtgtcttgttttcagtatcaaaggccattttaattccggattctaaaaagcaaccagtatttaaaatcatcagtagaaatgtaaaggaatgataatatggcattggaaaagactcacttttagacatagcttactaaagttattcagttggaagtaggcaattgtatgcattaaatcattttaagaagaaggaagccaagtgtgatggtgcacacctgaaatgccaacactttggaggtagaggcagggggatcaggagttcaaagccatcctcagctactccatgattgtgagtatcacctgggctgttaaggccttttctcaacaaaaaaaaaaaaaaaaaaaggaagggggaaaagagaaaatgtaacccaaaaaaataaggattcatggagatagcattgtctctgagaatttgtggagacaggacagccctttcagtctgaggtaaaggtcagagatagtggctgactgctttgcttctctgatctttagtttgaagtttgaaccccaatagcaatctctgggtttttatttttcatgttacaggaaaggaaatattattcaatataaataaatgtatactatacctatttcttggtgataatattaaagttctttgaagtgttttaattttgcaacatggatattctttattgtgttataatttatactttgtttaactctagagttacttaaatgtgttactatgaagcacaattatgaagatttgggggctcaggtaggttgactgatggagccaattatgcacagtagtctggtggttgattgacacctccctttaacaatacttcctagggtttgccagcattcctcatgctcttgcatttctgtgctcctggtagaatcaccacttaagtatgtaccctttctcaaataaataactgttggctaattggactatttttaagttttattacaattgactaaatatacttgcctaaattcaaatagttttgctgatacaacaaaacagaagaaacagtctcagggattttcaaaagctgtaattactgctttcatcaattaaaagcttgttccagaggctggagagctcacttgatagaatcctttcctagcttacagaaagaccttgtttagatccccagccttgcataaaaccaggcatcatagtgcacacctataatcccagcactaaggagataaaggcaggggtcagaagtttaaggtcatccttaactacatagtgagttagaggctagcctgggctgcatgagcccttccctgtcttccaaatataaaaagataaatcttcaaacagaaaagtttaatgtgtcaactagaaaataattttactccctcaactattttgaatgttgcctcttatgaggtcaaggaacatcaaatgtacaaatgaaaaattaatttatatctagaaaatagtaatatagacatggatgagtcctacacctttctagcatgcttcggtttctcctcacccatgcatttaaatctgagtaaattctcatcttcataaactgtacctctacttcagagagagagagatggataaaaaaagaagtctttacttatagtcacttgagatagctctgattccgttattatagttatatgctggcttgattatagatttcttatgcatgatttgaaccttaaggtgtcgaatgtgaacctgactggaaatgattttaaaataaatactgtctgtggttaaaataatcatgaaactggctgggctggggctcagtagaatatctgtctagcatgtgtaagggcctgagtttgaccctcagcaccataaagatagataaggggcaagagagatggttcagtggttaaaacactggttattcttccagaggactggagttcaatttccagtgcctacatggcagcgcacaactgtctgtaactccagttccagaggattcaacgccctcatacagacatacttgcagacaaaacaccaatgcatatgaaataaaaattttaaaaaatcatttaaaagaatataagcagatacagatagacagacagatgtcagaaagacagacagacagacaaaatatgtaaaatgaaaccctgaatcaggcatgatggtgaacacctttaacctcagcattcaggaggcagaggcaggtggatctctgtgagtcaaagccaggctagtctacagagtgaattccaggacagccagtgtcctgatttgggaggtgcttggtggcctaaaagaaaaaacctggtataggggttggcaagatttttttttatttccctttgtggggaggttacaagggtggagggcagatacggaggaaatgggagattgagtggaactggggtgaatgatgtgaaattcccagagtcaattagaaaattatgtttagaaaattgtaaatgtcgttttaaggacgatgctttattttaaagaagatgttgcacagcaaatatcactcaagatttttagacaaaatcagctgtggtataaccccaggcctcaggaaggtgaggcagggaaattatagactgaagcttgggctgggtttcggagtgagttccaggtcagcaagccacagctacagatgcagtttcaaagagagtgcaagtctcaggaaaggttatgtataagaacatgtttgtgtaccttctatttcttctacaaatatccccttttcattgagaacttcatatgtgcatctgtttcaatcaaatccctcctttcccctcattccctcctctccaacatctcctttcccttcctccaagtattctctcccaatttcatggttttttctttcttttctttttcttccttaaaccactaagtccccttggtgctgcctctatgtgtttgcgtgtagggccacctactggagtatggttaatctctcaggggccacatctctgcagaaaactgactctcttccccttatagcatccatcacttgccaatagttccttggctaagtgtggaacttccaaaccacctcccccatccacgccggtattttgtctagctggaccttgggcatgcagtcacagccgatgtgagttctaaggtatgactgccctgttatgtccagataccactgttttgctgtagtcacccactgcccctggttcccgcagtcccctcttcctggatgatcccttagctttgggaggatgagtgtgataatgctgtccttaacgctgagaactcggaagcctctcactctctgcacgttggccaattgcagtctctgtattaatcaccattcattacaaaaagaagcctctctgatgagggttgagagatgtgctaatctggtaagcatttgaaagtcggtttaatactgtctagctgaacacaagcagtaggtttatttaatgaacacaagtagtaggtttatttaacgacttgggttcattcccaataaaatgccttggataagaaaatccttacatcatcaacacactagagaaattcttttgaaaaatattttatggtttttgttagacttcataaatgattaactttattcatcatatattaacatgtccaaacgggcatgtatttcatactgccatggaaacttgcatccttaaacttcagatgaaatataccatcttctacctttaattcaagtaaatcttctaagaaacaaacacataaaaaactatcaggaaaatatttgctgatatacggtgaatgctcaagctagcagatttctactttttctggaaatggctccactataccagcagagggcaccctatacatatggggccaaaagcttaagttcatttgtatctcagcacttggcttggcagtctctaatggaatggcagagccagcatgtgtgcagaccaaagctagttagcctgtctctacacaattctgtggaaccttgagattttttaagacacctctcggcattaacatttaggagggcctgagttcagccttagtccaaatgggaaccctggctgcaattacaatttaatggtcatcttgggatattcctatcaaagtgtccaggggtgagtggggacaacttagcaaaaatgagacagttctggataaagtgagagaaccaaccaatttggaagcttagctttgggtttgaggggttttttttttgggggggggacctctctatgtagcccaggctggcttccaattcacagatctccttctagctcctgaggactgggattaacaaacataggataccacacccagtcttgacttttattacacatgttaatataagaattactgtgtgtgtgtgtgtgtgtgtgtgtgtgtgtgtggtgagattatgagaatttatattctactcattaaatattcaccaaatatttggcatggaacagtatattcaaacattttatatgtagtgtgttctaaggtttaaatccaggtcatatttattttaactgtgctatgctaacataattcagattactcaattatttttgattgagaaacgaacaaactgcagtgacagaatgtcactgcacttagaggcagtggtcctgggagagtgaagtaaatgagatagattaaagtctcatgcaatagccaactgtattcagagcctccgacaatttctgagggttaggaaggccacatgagtaaagttttcatgagttcagtctgtatacaatcacaaggacaagctgcacatggcaaaaacatgcttttccatacaggcatataaaggctagtttaaaattttaattgaataacagcaacaagcaatagtgagtaatctgaagtaaaatcactcctaactgctatacctgggaggagcacaaaaacccattccaagaacaacttcatgttttgaaagaaactgaggccccaagtctcttgtcttgttttcttggagtgttcccacaagcacccagaattctcctcatagaactccattcctgaaccctgttccaacaacacaggttattgtgaaattttccaaactatacatatttcaggtgtgtgtgtgtgtgtgtgtgtgtgtgtgtgtgtgagagagagagagagagagagagagagagagagagagagagagagagaatgcatgcgtgcgtgcatgggtgtgtgtgtgtgtgtatgtgtgtgtgtgtgtgtgtgtgtgtgagagagagagagagagagagagagagagagagagagagagagagagagagagagtgtgttaaactggcctggaactaaaacttctcctgcctcccctccctgaatgctgacattacaagtgtgtggcaccacatcagcttcttttctggtttctctgtagcgttatgttaggactgaaggctacagttgaagtatctttctctaccttataaatataaccccagacaaggttatctcattccatgttctttacattgtcgtgtatataaagaacaaaagtcccaccacaaagaacaacaaagaaactccataaatcttaactcttgagtatttttaagaaaccagaaaaaaaaaaaaaaaaaaaccagaatttcaagctggacgaagagattcatcccagtgagaacttgagaagctgaggagggaagattactgcaagattaaggacagcctgggttacatagtaagttcaagtctagccagaactacaaagaatggctctgtctctaaactcaaacaacaataatgggaagaatttcactctcaacacacagctagctctcatgaacatcctccatggacaatgctcacctctcctgatctccatggcagccactgctttcttcaaccattctcctgaagaccttccccactccgcccttccttctcaactctttctcctttctttccttcctctggacattccctgtcctggcctcaatgctgcatattttccattacccctttccacaaaaggtaggccttggaaagggaagaatggaggaagaatattctagatacccgaagtagaaatgatgaaggccctgacagagggctcagtggtttagagcattggctgtccttgcagagcacccaatgtgcacccctacacacacacacacacacacacacacacacacacacacacaacatacttaaaaatatagaaaaaaaccttttaaaaagaaaaagaaatgatggagcatctcacactgtcaaaatgaggaaggaaactattgctgtggagagatgcttttcttctttttattttttaagatttatttatttatcttgtttacagtgttctgcctacatgtatggctgcaggcctaaagagggcaccagatctcattacagatggttggagccaccattcggtttctgggaattgaactcaggacctctggaagaacagtcagtactcttaacctctgagccatctctcaactaccacccctacagatgtttttcaaaatgatatttgcctttttattagctctgacaacagcaaattattaatcaaatttgacattctcaaaccttgacgatattatcaaacccagaaagagaatcagaaatcctttgacttggaggatatcaacaattgctacattttaccagaagaccaagaccctgtgagggtgcagtgtttggatggcctgattgattgcaaaggtaggatcagaatccagatgcattaacctctcagcctgccttgtctgtcacaccatgtggccttgagctaaattgttagctgtaacattgacatcagaatgaagtcttccttaacttgagaaaagccacaatctcaacacagaaataaaattatctaagcccagtggcagagcaagtgcttagactgtgtgaagcacaaggcacaaaacccagcatcaacaggagaacctgaagagactgaggctggaggatcataatggaggccagcctgggctgttatatacttagaggtcaaatttaacctttctgatacttttctttctccattttatttatagagaggttttcccatgtagataataagcagacatcagatggtgtgttttaattgcaaataccttttctctaaacaatatactaaatatttcagaaatacagcttatgtattttttgtaaaaggtactttgattggtagtaaggaagatgaatatgattaaagaatgttatatgccttcaggaaaatgtcacagtgaaaccccattattttgtataattaatgtacgatagtaaaacctgaaaaagtcactttgcaaattcaccaagaaaacattatacatgcaactcctctaagtttgtggtggcctgggtaggtcatcctatccagtgacatcataggtaatgcaaaggtcaaaagcacctcactctggtagaacagccacacacatctgctgtggtggtttgagtgagaatggcccccataggtcatatatttgaactcttggtcccctgttgtgccaagtctttttactctttggcttttttgaggggtccaccacccagctctgaaataagtcacacatggagggtaattcctacttgtgaatgcccagcctcagcttggcttgttttttgtcagctttatgctaattatcccatctaccttttccctcccagcttttatctttcttactttgtatattttactttccttcttactctgtggctgggtggctgggtggctgggtggctgggtggctgggtggctgggtggctgggtggctgggtggctgggtggctagctcctgacatccttctctccttgttctttcctcgctctctttcttcctcggttcttcttctatttatactctctgctaccagccccgcctatccttgctccttcctggctattggctgttcaggtctttattaggatcatcaggtgttttagacatgaaaagaatcactgcctcacagagttaaacaaatgcagcataaacaaaagtcacacaccttaagacatcagctggtagaaaggtttgggaaggatgaagaggtatgtccttggaggaggtgtgtcactaggggttgcttttagggtttccaaaagcccactcttccaccctccacctcaagcttatggatcagatgtaagctctcagctacttctccactgccatgctctccgccataatggcctcaccgtttggagtggtgagcccattaaacactttcttctacaaactgtcttctgggccgtagtggcacacgcctttaatcccagcactctggaggctgaggcaggcaaatctctgttagtctgaggccaacctggtctacagggctaaacagagaaaccctgtctaaaaaaaaagctctccctggtaacataataaaatggtaacttatttcttattctgtattcttctctgctttatagaatttctacaatagacatgcagtatattggccaaaggacacatatttacatgaaaatggctttatgaaatttgtgacttcacataatgaacagccaataaacacacacacacacacacacacacacacacacacacacacacaatttatacttgattgtatccaaaaggtcagtaagttcaataagtagatttttttaaatcaagcctttctaagttgactctccaaatgtgatggggacatgttttggagaaagtgcacaacagtgcaaaggggtgttccagccacacttactgctatagaggtatatgaagcctttgtcagcctcagcacatggacccttaactgtgggctaagcacagtcttccttctcctagcccactgcaatccaagcagaagcaccttggtggactggcccagagcaattatgtcttccagtgctctgtgaaagccacagaaaggccaactcctctcagaacaggcagatggaggaacaatctcttaactcctgtacatccagcaatattggtacagacacaactgaaaaaggcaagcagtttccccagggccaagtgacatgagttttctctcagggggtactggacaaagctagctggcattgccagcaaagtcctagccttttataaggaagataacggacaaactcagaaagaacccaaactgaaggcctgagtgtgttgatgggggaagagtcgggctgtgagcactatggagacactgtcaggaaatgtccatcgtccgtaagaagcaaagaaagctctgggctaagagctaggagcctggtgcccttctaattttagttatgtctctaacagaattgagaatagagtgtagagcatgtaagtgagctgtagagttgctgctagccttcacaaagtacacagagacttataatgaagataaacaataaaaaattcactcaatgtccattacacaaggagaataaatcactgtgcctcttcaaagtgctgtgaacttcctaatacagcagttatcaaattgtgggtcaagacccctttgggggttgaatggcccttccatgggggtcatctaagactaccaaagaacacagatatttacattatgacccataagattcgcaaaactatagttatgtagtaccaacgaaaatgattttatggttggtgggtcaccacagcttgaagaactctattaaagggtcgaagcatcaggaaggttgagaacttgtgttctaataggaagtataatccgctataccacttatttaggaggatattttccaccaaggtttgatttttctctgttgccagagaagcttcccattctgctgtcaatgagcagcacgggttttcacatttgggagacatatgggtttggttaaaagcatgaacccaggaagtctgcactctatttcctaactggctggtctctaaagaagacttaagtctctcagcttcagttgctttgcctttgaaataggaataataagagcagccacttccctggtactattgtagggagaaaatacctgaagtacctctcagtataccattggtatttaccttaacaaagtgcaagatgctgaaatgtaggtttgaaaggcaccttacacataatcaatttcatttaaattatctcatttttcacaaagaaatcataactaactcacagaggttgcgtagggctcaggcacccgtaacagcctctctcttcttatactcctccttctctccctcccttactttctctcttattaatattgattccctttgtatgagttctgttggttaattagaaaatatacctttctaaaaaccaaaaataaaaaaatattttcaggtgatttggaaattattcctaaccatttctactactttgaatactttatttgctacatataagcttataacttccatttcagactgtttttctgagatgaacttggcatttgactaaacagcccaattttttttttttttttttttttttttggtttttcgagacagggtttctctgtggctttggaggctgtcctggaactagctcttgtaggccaggctggtctcgaactcacagagatccaccggcctctgcctcccgagtgctgggattaaaggcgtgcaccaccaacacccagcatttgactaaacagcccaattgacccttgtcacagctcacccaacccagcctggctgagccaggagattcacacataacccgtccagcctgttactcttggtttctcctgtcacttttagctagtctgaaaaaaaaacaaaaaacaaaaaaattataagtttagacaagccatatgtgtttcattcattccaatgatacaaaacatctcttctagaaactaaaactggatatgcaaaggtatctggcaggtagcaagaaaactcaaggaacacagagagacagacactgtgtggtctcacacatgaggaatctaaggacactgatcttgtggaagtaaatagtgtgtactaaagaccaagcaggaaggggcaagaggaatagatacacatgggtcaatcattcaaaacgtagaaagtctagtgttttctgcatagtgggatggctatggtgactatggtttacttgtgtacatatatttaaaagtagctccagaggtggtgcacgcccttaatcctagcactccagaagctgaggcaggtggagcttggtgaggttgaggccagcctgacctctcggtaagatctggtcaactcagagctatatagaaagaccctgtctcaaaacatatttttaattaaagaaggtacctatgaagattttgtagttagccatgaagaaataaaaagtatttaaagtaacagatatgctaattgttggggactgaaacaccaggctgactctgccccctaaaaacaggcaggcacacacagtgacatgccacaacatagccatgtcactccttacacattacggaccttcgtgaggactctgcacatgcatgaagcctcagtgtgcatgctcggttttccctttaaaagcttgtacctccccccaaccttccttctcttttccttctcttggattggttgcttaatataaaataagccaggcttggtggtgtaggcttagaagacgagattttaaggagactgaggcaggaagaccacaagtcaaggccagcctgggctacagactgagttcaaggcttgctgaataatttagtgaaactctcttgcaaaataaaaagtaaaaagagagctggagagatatagctcaatggtggagtgcttgcttagtatgcatgaagcccttagttaaatccccatttccacaacaaaaaaaaaaaaatgaaacaaaactttaaaagtaattataatgataaaaagaaactaaacaagagaaaaagaagctaatgtgtttcctgtggtttctaggtggctagggacacatcagtccccccagtaacctggttagtcatggattatgatccccatttcaggtgaaaacactgaaggtcagagggcaacttgactgaagtcatacagccaggaaatgatggatttggaatttgaacccagaccattatgcttccaaactacagccggtaattactcttgctccaactctcactattctttacgttcagcagatagagaatctctttgtataaaaagtgaaaaacagttttatagtcttcctacagtacggtccagcgatgtatctgcagacaagaagtcctgtatgacattcactaaaacatgtccagcatctagtaaacattaccaaaacactcaagttgagtcccagactcctcccaactcatgggaggctttagtgctacttggcattgttctgagtttcagacaaggtctcactacctcttccaggctggcctgggccttccttcctcctcccttccaagtgcagagattagagtttgttgtcaccaaaccctgctgctaacatggcttcaggtgctgtgaattctgcccctaatactgtcagaaatgagagcagctcttcacagacagggcaagaattgtccgcccttaatttccataaaggcttgtctctaaattcagcctctttgtgatggatccattcctctttcctggcctcgccggcagcagagattctgtgctcttttcactggctttctctcagtgtttttttccagtccacttacagttgagagcagatgtagatgctggcctgctcccaaaatcctgcaactgactcctgactccagcattccccacagactgagcagtgccgaagtagaaaatgacttcaacccatggctgaatgcgtattgctgccaatccagtttcagcccaaaagagccagtcctatttccagttccccccgcccgccctgccttttttttttctcctccgttcgtgctgagcatgtagagtataccacatttcggtgatttaaggcttctttctccctcctctggcccagcatcatcatttgtctctaacagcaggaggaacaaagtttttggaaaacctgagaccacaatcgatcaagattatctggatttggctaccatgcaagtaaccatgagctcagacagaagacaaagtgggtctttaggaaagtgacttcaagaaactaactccagcttcaggctggagagatggttcagtgattaagaaggcatactgctcttgtagaggacccaagttctgttcccaatccccacatcaggcaggtcacaactgcctataatttcaactccagaggagcctatgccctctgctgacctcgtcaggcatttccgctcatgggcacacaagtgcacaaactgaaaaataaatcctaaaaaagaaaaagaagtggctggagagatggctcaacagttaagaatgctagctgctcttccagaggacccaggttcaattcccagcacccacatggcacccacatggcagctcacaactgtctgtaactccagttccaatggatctgactccttcacaaagtcatgcaggtcaaataccaatatattcatatatatatatatatatatatatatatatatatatatatatgaaaagaaaaaagtaactgagggtcatttaaaagatgaataaggttagagcatgggtgtagaggaacaacacagcataactttgggtcactcatgtctgctaacgtcagctgtgtcatttccgcatcactgacaaatacaggaaactgtcctgtgttgataagcagatgagaggatagccaccactaactctatcttttattccagtaaagctactgcggaaaacccctgctgcgctgggacagaaagggacaggatagcatcttcacagccctcacttctgggaataactcatgatgctcacagtccttcagctggagttgtgcatcttcattgcatgttaaacaaatgcatcatgagctgttctctgagcaaatctaggagctccagaatctactcagggtcttcttttctattcgtttcaataaattgagactctggcattcccttaaacaaccatactgtcctcattcactcattcactcactaaatattttatttccagttgtgaatcaagcattgtctgagacacagggaacaaagctaaaccagaaagaccagggctttgctctcaggaagcattggaccagccagactccattctctgagggcagattgtaagcaccttcatcagcctaggaaatatttggtgcttgggagtgatatttcaaagtcactttgtcttgctgctgatatccatagctttttcttctcccatgctttttttaagctacaaaatgcacagccctgcttgacaagaaagcaacaaaaacctggagacttgaaaagagtcatttattgtttccctgaagtgtcagcagaatgatgttaagacctggggggtgggcagggggcacgtgggacacaacacattctctctatggcactcagatcactaatctttgagatatataaggctatagagatatcctgttacttcttgttaataatatttgaagaacttttacaagttagctcgaaggattaggccaagtaaattctctgagcagacggtgcaaacaaaacaaatgataattattctcttagaagggccaccggactgacacactgtttttatagagaaggaagcagccttgcaagagtcagagtgaatagtgttaaaggcaaaatcccatcaagagaaggacctgggaggtgagggaccataacaaaacactacctgcatttcagcgtctcaccaagaaaggctcactgcctccccaaagagaaaaggttagggaaaaacaattagggagaataagtaggggtgaagccccagctatgaacaatgggaagcctcaacacaattgtcaagtgatagcttcctgccacagaagtgagggcaccagagccagcaaaatggaaacctgaactcaaggagtcacaaattgggattaaattaggatttagataatgaaggcggccagagttgtcctgttctacagaacttggctggggggaggggggttggtaagacaagacagctgaataatcacagaatgtgagaaagtatggaggggtgagggtggtcagaaagaacactgtgagccccaggggaagcagcgggttgatttaggcgcacagcaccgacatcttaccagagtataagagttttcatctcagtgtggtgctgcgtacctataatcccagcaccaggaggcccaggcaggagaaacaggggtttgaggccagcccgtgctatatatttaggtcccacctcaaaaccagaaacaaaaaggaattttccagggagaaaaatacagaagacagagtttcaatttcaagaacagcatgcgcataggtaatgaattaaaatcaactgtcatagctaagtaaggactctggacgaccccaaagcaaagccagcaaagtgttttgctcactctctctccccaccttccctctctctgataggatcttactgtatactcagaatggtcttgaagccactatgatcaggttgctttgttcaatcaacctcatcttgataatcatttttttaacttacaggaaaaaaaaacggcaacaacaaaagaaattacatggtggtgcatttgggagggtgaggcaggagaattacaaattcaaagccatcttgggctacacagtaagagcctgtctcaaaaagcaaactgaataaaacagaaacagatttcatagaaaaccatttcagttgtcaacactttccgttatcattctctctgtctccacaccctatacacgtaatattttaacattcagagagtaaaccaagcacagacactgaagtggtttcagtagtggaagaacactcaggcctgcggtttagctcggtggtaaaacactttcttgtctagaatccatgcctgagatcaatccacaggcttacagaaaggaaagaaaaagaacacaacagtgctcgtgaagacaggaaaaccttcaggaatatattaggtgtctgtaactacaataacaggcaattagatgaagggagggttccttggtatgagaagagaaatgttaagggaggaaaaacctttgccagttgagtgtgtctaaggggaactctggtttcgaaatttggtatctgagtagtagagactgtaatgaaaaaagataattaaattaaattaaaaataaaaacagtagagcatgaaagtataggtgtgttaaatgttgctatatacacatgtatatagcaacatttatattgttgctatatttctgtataattctgcttctgtgataagcattatttcaaatcctttagataaactaattcatttaattcttgtaacagttctgcaaagttaataactttgttttacagatggtttaagggcaaagatgatggagtctgcttctggaactaagtatagactactctgtctgtaagctctcaactaggaaatggacaagagaaatgtaggactatagaattagctttaaaattttgcaatatttggtgtctgtggttaatagcatttgccattcttgcaaagaacctggttttggttcccagtacctacataaccatcagtaactccaattctaggggatccagcacccttttctgacttccctaggcacaaggttcatcttgcatacatgcatgcaagcaaaacttacacacacaataaataaatattaaacatttgtaaaggaaatttggaacatttcaccttcatttacaccaggagataacttgctactcttcagacctccaaccttggctgaagcctgtactcagcttacatgtaaatttgtgtctgtaaatgctttgtgttatatattatattaatgtcgcccacattaataaaactaatctaaaatgtgaagagtaggaggcacttttgattaaaaatcgcttttaaattagatgaagcaaggtttggtacagaaatggcaaatcattttcatttctaattaaatttttaaaacgctttaaatatcactggaatgaaaaatcagcatttcccaagcgcccccttgtggcatggactaatgatccccaaattcctgatagatggtgagtggagaacttgacaaagtcagaacagggaagcagattttctttttctgtgttgggcattgagcccagggtcttgcacttcctaggcatatgcctgagcacaacactgcacacctggctgcaggcctgtgatcctgaaagtggtccagagtgatttccgttgagtagccactgtggaagcctgcagcttaaaaccttctcactgaccccaaaatgtaggaaacaaacttttcagagacacaaggaaacagagaccatttttcatctactaggtgaaagatgggaaacatggcccaaagtcaccaagaatgtaaatgttaaaatgaaaaaagcagtgccttcttgaccctaactgcagcttgattgattagaagaacagtctaatccaatccctggcagcatgctgatctgagaactcattgtgttcttcaatgttccctgaactaccagcccctagttctaacctcttctgaatcctcagaccaaagaggccaacctgtccctgtgaatcctcagactgaatgctctgagctcctgtctcctcccaccttacattcctctctccatccagccatatcactcctgtctccacttctctagtgctgggtgtaaaggtgagtgactccaaagtacagggattaaggtgtgagccaccactccctggctctgtttctcttttagatgacatctatctcatgtagttcaaagtggccttcaactcacagagattcccccttcctctgctttctgagtgctggaattaaaggtatgggccaccactgcctggtctctctggctaactagtgtggctagttctgcactctgatcttcaggcaagctttatttgttgttgcacaaacaaaacattgccacagccctgtgctttaggtgaatctttactgggattgatcattgtttcttagtatatgcttggccaggtcagtaaggaggctgcactcctcatgcatgctcaaggcccaacctgagaggtaatcacgtgcaactatccaatcagaggagtgatttacatgtactataggcctagctcgtgactcaccatcagtcatgccctcacttccaatggagaactaactcctgtttcacccccataattaaatttctctgagatggtttttgggtcctttgccacccccccccattacacacacacacacacacacacacacacacacacacattcacgtgtacacacacactcacctgaatttattttttgaagttctgagctgctctgacattcagagctggccttgggggattgggaggcagaggcagttttcttcaagtcagaccagcagtgtgggcatctcctgagagctcgctagagatgcaaaaactcagtgccccaccatgtctcttccgaagcagaactgtcactttaacaagaccccagaggagttcatatttactttagtgtttgagaaacgctgccctaaaaaacaatttctgaatgctgtggctgagaaagcaacaaggtcatctaggccatttcagaagcctagggagcatgcctgtgattccaagcacaaatttgtagaatatataaatgttttagcttggaggtgacacaaaagtccagtttcattctctcttccaagcacatgcttcctcttacccatggtggtgcatttgcttccaaatgcagacagtactggctagcagagttcaagcctcatcatttcaagtagattacataagaagccagcaactcccagcatgtaatgagatactgggacctcagcaaattgctgagattttcttgattagtcacttcctcaatagtatggagtcagtgatgctgatcttatgatcttatgcatttcccaaggatgataaaagatccaagaattcccagtctcaggctggggagaagacggttcagtgggtaaagctgagcaaaagtgaggaccagagttaggattcatccatggcttctcaaaccaaagctgttacagtaaatgagaggcttaacacttctcccaagggtttccatttctcctcacttgccactactctggttctatgtaatatgttgctgaaccctaacactttttggtgcctctgcttctgatgccctttacttcatcttttagtctgaaactagatggattcttttctcttttaactcgattgctgcaccataagtgtagtcagaaggcagcttgtggacagttgctatgagttcctcaaggccaatttggtcaacatagtgagatccaggactacatagcaagaccctaactgtagtgatatatgattattatttaataaagcttgcctggggatcagaatgcaaagttaatctcactagttagccatagatgccaggtagtgatggtacacacctttaatcccaggactcaggagacagaggcagatggatctctgtgagtccaagaccaccctcggctacaggagagtgaatcagcctaaaaaaaataaaagcacacctttaatcccagcactggagcggtatataaggaagaagcaaagggtctcatatgagatttagtttccagtcacagggaagacaagatctccatttcagcctttgtagaagtaagagctactggctgcctgctttggttttctggccttcagcttgaaccccaatatctctgtctctgagtttttattattcttgctacacctaaataaaataaacaaaaaaaaaaaaacaacaaaaactcaaggaaaaaaaagatatagtgaagaaatgagaggtggaactgggtgatgaccatgagtgtttatgtttattgtgttatttatataacttacctgcattttataatattttatattatggataaaattaacaaatgattttcacctatgaaacatttaataaactattaagagcttattttctatttattatacattgtctctgccataagccaccatttctgtttgtgggttcaaggcgccagtggactgatggtggtttcacagccaccacctgaggaagcattctgaggatgcattctgaggatgcattctgaagatgcattctgaggatgcattctgaggatgcattctgaggatgcattctgaggatgcattctgctcctacactaaaattacacattcagttaaaacagaaagtaacaaaaatcctgcctttgatacttactagctattcaatcttaagagtgttggcctcagttttctaacccacaaaatgggactaaaaactccaacttcaaagggttgctgtaattactaaatgaggtaagtgtgttccaagtgcttgggacacagtgctaccaatgtgttaacttccttccccatcatgaaagaaataggtaagagtgaatacttgagttagtatgcagctatggctctcattaacaaataaatgtaacccgtacactatttcagttaacggactttacagatgttcactgaatggctgtctaatattttaaatgaatgagtagcttcaccctcacagatgagacctcagagccagttccctggagagatttctggaccacaccatgtaccacagaggaatggagttacagaagctaggaagatgcctgagtggataggagtgcttgcttcacacaaatgaagaccagagcttgtatctctagcagtcatataagataagccaggcatggctgggccttatgtgatcacagtgctggatggttggggtgttgagacaagagatgctggggttggctgcccagtcaacccagctgaaaaacaaactccaggttcagtaaaagacaggtcttgaaggaataaggtggaaataagggatcaggaatgtgatattccccttctggcctctgcaggcacatgcctgagcaagtgcacctatacacgaatgtacatacatgcatataccacacacgcatataccacacacacacacacacacacacacacacacacacacacgagccacacatacaccaaaatgaaaaaaagaaaactaatgacattacagatatgtcactctgagctagtaaaatgtttaataaataatgataatgcgactctttctgccagcttggtacttaaggccattcatactctctgcttccgctgagtcatagctgagctggagaatatgatttcctaaagctacctggaaggctggctatgtcatctctgggtgtaatggatcccaaataaatatccccttcagggacccggagggagaggattgaactcctgggaagtgggatggtgttttgtcctagtttacaaaaaatatcattagagtccattcccagaatatgtcccctggatgactccaaacaaagctaagggaagagaatgcatatttttaattgattgcttctttgagccaagtcctaaggtgcctgataaatttttaaattctcaatagttgcattcagaataagtcccaaactgatgttctaatttaggatgctacaggcatgagagctgtaaatcacggcacagcaaattgctgttttgactaattgtgggctgcatggaaggtgtgttccgcattattcctagccactttctccttctttattgtgtatcagttctcaaacctagggatgggattctaatctttcctcccattaataaatctgatgcttagatcacagaaacttggaggtggagacaggagttgggttgttgccttcattcccccaagatcatggattttagcttagtagttttgtgcctgcaggtgtgcaccaaaatcagctagacatttgtgaaacatgtgccagtggtcttaggtccttaagtttctgatgtagtatgtgtgaggtctagaatttgtattttgagcaagtttacagttgttattgatgcttcatggttcagaaatcatactgtaagaaccaagtattttagttcattgtagggtaagaatcagagatctatcctcaagtaactcagcaagttttccagagtgttctctaggacagggcttcttaagcctcctgcccctcccttttttgctgtggataggaacattttgtatgttgagtgtagtctccaccattcactatcccccttattctccctcttgttcccctagatagttttacttatatttttgtcatatgtatgtgatatatattatatgatatgatataattttacatgactatgtaaaacctgggcaccacaaatgagagaatacatgatattgcctttctgagtgtgctggatagttttgaatatcaataagacacagggtaagttattttggaaggggaaaactcagttgaaaaaaatgcccccacaagtttggccagtgggcaagcctgtggtgaatttacttgactaataattcatgtggaagagcccagatctctgtgagcagggtcacttctgggatggtggtcccggggctataagaaagcaggctgagcaaggcatgaggaacaagtcagtaaacagtattcctccatggcctctgcttctgttcctgcttttagatttttgttttgagttcctaccttcaatgccctcagtgatggagagtgacctgagagttgtaaactagagtactctttcctccctaaggtgttttggtcacagtattttagcacagccatagaaatactaatgaagacactgaggaaatcttaattttcgtaattgccttcagttatatccacttctctatggataatataacttcattcctctttattgctggaaaacttctattgtgcattgtgctggtttttgttaattattagagtcacctgagtagggagcctcaactaaagaactgccctgattgctaacttttataggaggatccagtccactgagggcagtgccattcctaggctgcctaaggcagctaaaaaagccagagggaaaaatcaactgtgcagtgttgctccttggcagcagctttagttacttcccccatgttcctgccttcttagattcccttggtgagggactatcacttggatgtataaaatgaaatcaaacctttcctcttcaagttgcttttggtcatggtgtttatcaaagcaacaggaagcaaacaaggcatgcaccagcaccactcttcctttattcagtcctctgttgttggacacctgggttggttagcagctgtgaacatagttacaataaacatgtctctgtgatatgttgacttggagtcctttgggtaaatacccaggagtggtatagttggatcatagcctagatctatttttgctttattctgagaaatctccatgctaacttctataggagctgaactaatttactttcctgcccagggtatataagggtttttttcctggccacatatgatttctatgcttgagtcactttatgtgatgtattatattaatagatttgcaaacattgcaccatccttgcatctctggaataaagccaacttgatcatagtgaatgatctttttaatgtgttcttgaatttggcttttaaatattttaattagaattttgtttgcatgtttactagggagtttgacttctctctctccctctctctctctctctctctctctctctctttctctctctctctctctctctgtgtgtgtgtgtgtgtgtgtgtgtgtgtgtgtgtgtgtgtatgcatgtgtgtagttgacactgagttgtagatagatttttctttggactgccagctcacaaaaacaacatggagacattcattatgaaagcctggccttggtttgggcttgtttctaactagctcttataacttaaattaacccatttatattaatctacattctatcattgaggcattacctttcttccatcttgcacctcctgtttcctctctgtgtctcctggcatctccacccttcttcccagaatcctctctgtccttggaagttctgcccaacctctttctagctattggctgttaagctttttattacaccaaccacagtaatatattttcacacagtgtacaaacattccataacactgagtgtctttctctattgttctctgctattgtttttctggatgtggtgaactttattgatggtatttgtgagaatagtgttccttagcctttgcccatctcctggaagtctgggatggaaattgtgcagggagatgtttattgtgttgtgtgctgggttgggacaaggactccacagcagttgaggattgctttcttcctttcatgttcttgctgagcagaaggtcagattctcatggacactggaagcaggaacctggaaggcttcccattcagttctgagatgaccttgcccaaagatttggagtttgagtggataatctgggccccacaacacaattttcaagagaggccattcacagtcttctggatgttggtgatgccatacactacggtcatgagctgccatggatgaccttggtcaggggagataagtagttgttagtactggaggcattgaagaagattttcagtgagttattatactactcctagtacaggcccatcacaaacataggacaattagaaggagaggaagagatggtgacccctttgacttaacctttcaagtgagccctgatcttctctatggatatgaaaacaccagtagattccatgttatatttggcactggcatcaccccattttatgctggcaaaatctcactccaggaagatgatattgctagacttgaaggcaaccctagtgaccaggtacctattgtagccaaatccattcacttcaaccttcaccatcatgtctcagggatggactggtactacatgagaaaatgcagttattcagggatgggaaggagaagagagcctctaccttaattttttgagacagagttatctcgttgtaccaagcccctggaatcctcttattttcacctccctggttctgggtacacacgtgtgctgccatgcctggatttttaacatggattcggagtcagaatgactgtcctcatgactgtcaacaagcactccaccaactgaaccatattctcagcctttggattcatttatttttaaatatttttaagtcaatctagtctttcagaggtaatattttcaatattgaagaggaactaggttgttgtggcattgagatgctgtttttgctgctgtagtggtggttggggaggaaggctcaatctccaggactctcttgaaattagaatacgatctgtaaacatgactattacaggatagtcccacaatgaaagtacaataatggtcaaacaaaaaattaatcaccccaaagcgccattattttgggaaataaaggggtactgatagttgtatgcatattaatatattagttactgtgggtatgagtggaagggaaaataaaagaaaacaataacaacaacaacaaaaaaccctcaggactcagagtaagacttgtgattaatattgaatccatggagaaaaactgggaatagggacatgcatttggaagagggaacaatagtgtgaaaggaaagtatggtcaggcagtttgggtagaagcttcgcagaaaagggagagtaatagaaaaatactactaattggcaaaagtcattcccagctttcaggaggctaagacataaagactcataacctggttagcctggagatttgcggactggaaaatgaaaaggtaaagagcagagagggagaagggatatgatgggatgatgtagaacagaatagaacagcacagagctgccctgctacactggcaatgggttgttaaacaaaggaagaataaatttgagggagagagagctggatggagtgaagggtaccaaagcaatttggcctttgtcaacacaaaaaacacagctctcatctcaaagggaataagagctagtttattctggagccaatttctagtgaccacatccaaggaacatagatttaggtctcccccaaatgccatgttccaatgtggaagcagtttcgtgaagtttttatagccataaaacaaaggaaagttataaatcaaggaagatttcgaatgcattggtagaaacattaagtagatagttagttaaagcacagtggagaaaccttagctacaggcctcagatgttatcttaaccctttgatttttagagaatgggcttttgttaatacattccaaagggtttttatctgcttatcagggttttaggtgggcaaggaatggctcttagtccaagaaaaactgtaattagtacctagacccgaaacattccaaactctccacagtccttgaagttttaatcagtcagttggcctttgtagatagagcttttttccagagtttcttgtttacagcctgcttcttgctttgctaaattccatctcaaattagaggctctgggcatctcttccctggctccctgtggtgcagacattcctattctcatctcagggcctccctctgggggacctgcttacaactgtggcctggtcagcagccagtgcttcacagatggcttctcagatgctggccacacatctaggtgtctgtcagaccactggttgccagggatggttcttttcttatgtgatcttttgttcattcagtgttgcaatctgttttacctgagaattttacatgaccatgggtctacagtatatgaaatatatatgcaaatcaaacctttactgatgacaaatcacaaagttatttatagcatatattttctttattcttgagaatttcatacaatgaaacatagtcatattcattctgaatcccttcaatacagctcttttcaggttcatatcctatttttccctttctttttatttttttattttttatttttttttgataattcactaaatccagtagtgcttccaatgtgtatattgttgtgggccatgagaaatttatattaaagcaattctttggtatgcatatagttttatctcatattaaagatggaatcaaatttgcatgttaatgagctggatatatttggttatttctatataaaaacgtaaatcatggctgaacatttgatactgcaggatatagagtattatcagtgtttttcatagttgacctctatttttataatgctgaaaaaaaaacaaaacacttcatgtaaatacaaaatacaaaatggcagaagtatgtttggtgccattgcagaaactgttgaaaattttgtcctaatctccaggaaaattatctgatgtcttttttacgtcacttctgtcagcaactccaacagaaggaccacccacaggcaaactaatctcacatatgttgagtattgatgataggaaagaattaaggattttgattgtctgtaattaagccgtcgtatttctataagaacaggaaactgtccgggcagtagtgatacacacctttaatcccagcactagggaagcagaggcaggctgatctcagtgagttcaaggtcagtctggtctacaacagaagttccagaacagctaaggctagacagagaaaccctatctgaaaaaaacaaaggaaaaaaaaaaaaaaaaagagtggaaaactgtgtgtacagtaaagaaaaatgctgctatcccacgacatataatcatctccaatccaagctgagatgtttcaggcagagctcactggagctgcgttgcgtgatgacatgcacaatgtgaagtatacgtgtcatattctaagaaaaagagtccagtgaagttacatgatgcaacttgggcaagcatgaccagaagcacctcacattcattacatatttggttttggattcatttttagctacacattgcaaaatctttcaccactgccaaagtttttgcaagccctacattcagttacacaacgccacatggggtcatgacccgcagcttaagaagctggggtctagggtataggtgcttttccctttgttgttctcttttccaggtcaagagcataaactcggagtctgatcaacgctagctgccactgaaccaaaccccagttctagcacaatcactttatgttcggggttgggagctgtgtgctcatctttgtaataagcgaagctttttctccgatagtcctgcagagaaggcaaggcttcacctgagaagcatgggctttcctgtcaaatagatctgggaacaggatcaggtaacccataggttggtctggagactggaagaaaattacttaatttgagtcctgctgtcttcatctataaattagaaattgttgggtctgaagatccaaggctgataaagtctaatgcaataacgatttgacactgagactcgagactctcatctaattagtgggacatcttgtttagcttctttgttttcagatatagaaacaaaggcccagggagagtatctttcatagccaagctcttgtggaatatagcaaagtgtggaccagaactggcccttttcacaggtgctgggaagtgaactctgggaatcctaaacactcctgctaggtacacacgcacgctactgctctgcgccatctccgccagaacctgctcttttcctcttctgttttgggggctccaacacgggactcacaggcaagtgatctaccactaaattgcacccctgtcttctcagagcctatttggattcttcgcctcaaataagactttttttttggggggggggtttcgagacagggtttctctgtgtagctttgaagcctatcagttctgcctgcctctgcctcccaagtgctgggattaaaggcatgtgccaccaacgcccagctaatacttgttttattttaatccgtttcattgggaaattagttagttaattaaagatgtttcagaactaaacattttagtactgaaaactgttacagcagtatagaattggagggttatgacaagcatttcaaagggccattttagtcaaatgtgatttaatctaccattcaaaatcaccattcttgagctgggctatggaatcccaggacccaggaggctgaggcaggaaaatgaaaagttccaatccagtttgggtttcaaaatggaagtgtctcaaaaaacaaagtaattatgctggcagtggtgacgcacacctttaatcccagcacttgggaggcagaggcaggcggatctctgtgatttcgaggctagcctggtctacagaataagttccaggacagcctccaaagctacagagaaaccctgcctcaaaaaacaaaacaaaacaaaacaaataaacaaaacccccaaagtaattaaccaatcaactgtccatttttggcacagtggggcctacctgtcatctcagctcttgggagactgaggcaagagaaaccagagtttcaagccagcctgggcgtcacagcataactgaatccaaaaacaaagccaacaaaatgaggctggagagattgctcaatggttaagagtgcttatggtttttggaggggacctaggttgagtgcttagcacccacatgacggctcacatctgtaactccagtttcagagaatctgactgatagtttccattgctgaagcatcctgcctctgccaaagcagttaaatcattaccttcatcaggtgcctttccacagtcagctatgggacatgtataccccttaaaagtgccggccaggcacagcttcctttctttgcctcttctttcttctcttacccgtcttgctcctctcttgactcttcttcctcttgtctgtctgtctgtcttgtctgtctgcctctctcatgttcttacttcaacatggcctttcgctctccccctcccccaataaacctctggcacttgtttgcttagcagcataccttgtcagggttcaccgaaaggtacacacttcatctttcttttttatttattattacactgatgcttgcttctggtcttcacgggcttctacatgctcatgctgcatataaattctcacatatgagtacatgatggagaatgtacttctgtgtatgttcatcttattggttgttgaataaagttctgtttggccaatgaggcagcaagttagactggactaggagtcaaagaggattctgggaaatgtagtaaagaagtggtgatccaggcaggaagtgacatagcagggagactcatatttaaggaaggacaaacaggaaggggtcccttttcccctccgctcttcctccagatttgcgatgtgatccaccgacaaggcaggatgccaatggaaggtgtccgataagataagtcttataaaatatatagatttatgataattaagactgagctaacagatgagaatcctagtcattggccaagcagcatttgtacattatagaaatctctgtgtactatttggggccctaactcgggtaggcagctggcgtaaagcgcacacgtggtagtggggcttggcggcttttggcagaaagatttgtggtaacaagtacacataagaataaataaataaatctatttaaaaaaaaaaaccttaaaacacaaagcatttaggcaggctggcacacacctttaatcccagtacacaaaaggcaaaggcaggtggatctctatgagtgtgaggccagtatggtctacaaagggagttctagaactttcaaaactatatagtgagaccctatctcaaaacaaacagagtcactccttatatgatgttgggaagcattgtaaataaaatcaaagtataaaattacaactacttagttttaagacttaaggtctccactgggactactttttattctccagttgagtgacactactaaggaggaggagtgttctgatgggctgagcaaagaaggttgaaggaagccaagacaaagcataaaaagtggctccatccaggggaagggttgtggtcctggcttcttgtagtcctggctctggggagatggaggcaggagggattctgtgtaggtgtttgaacccagcctgggctgtaaaccaagccttgactcaaaacaaaagtacagggggtacttactagttactttccttgtaacaaaaggaaaaacaactgattggttagcacacatggagttgcttcgggcaacctttctatgtaaagataaaagcagagggaacttcataaccattccatgtgagtctgtcctgtatgagaaacttgcctgcctctcagttctcccatttttaaaaatcaaatgacaatgttatgccttcagactgattaactactgttcgaagcttaagtacccagattttgtcagtgatgatgaaagtcatcccacacagcagagatttttcactctgccttgtaaggacttactgaaatgtaatgagtttgagtggtaaagaggatgtatttacagccactggggagagagctaaatgaatcagaaagcccttggtatctaccaagttgctgatagatgggaaggtatcatccccagaggagaatgggaaatccccttaaaaagccattttgcttgtggctacagtttgaaacatggttctacctctgatgacttggagctcactttagtaggcctgaccactccaaaaacaaatgattttgacacgatgacataaattatgtatgagtatcaattgaatattcaagcataatgagtttatggaatccaagagaatgtttcctttgagatgctgaaatacggctattgttaggttcagggcccagctgatcccttatagggagcctttgtgcaaatttgaaagaggcaccccctctgggtgatgcagttctgtgggtacatgacttggcaagcagagaatgggccgaatcttagcacccttttgtcccactggctggatgcctttgtgcaatgcacaaactgtgcccctttaagtggcagtcccaattgctgttggaaccctctgccagcagaagagatttcacaggcttagaagtgcctgtgttgcttgtcccagaggacatttgaaaatgcagaagtgacaggcattttcccttaccctaatcctgaattcatctgtgagggctaaagtgtcaggttcaaatgtcccctgaagccttggtgaagccttcatgatggagaactgggttagaatcctttatccagtcttagtagactgaacctgagggttgtgtgtgagaaacataaaaagatatgggcttcagtgtctgcctgtgctcctagaattgctacttcatggtgccacagcaatgagaaccaagcacttgcatgggggtgggagtggagcaaagaaaagaaagaaagttaatggtaaaatcataggaatcagacagcacttctggttccaagacacaaaggaaaagatatacatcttcccatatctcctggtcattttgtgaaaacagtgctagagaaaaggtgaatttgactaaaggaattctgcagtctggaccaccgcccgttaccttataaaatctagactgggtgttaggaaacaggtagtgtaagcatgccaacaggtgcagaaaacaggcctaagaaaagccagttccttctagctataggacaaggcaggagatagccttgcagaacagttcagtttgaattgctctctcctctagctaaatatcacgacactaaatgtaccctatcacgactcacaacaccaaagctgaatgaggagcctaagcttatgttcttgccctggtgctgcaagatctctttctccccacctcaccccatgggattaaggaagacctgtgggtgggaagttaggatttcataggatcttggcagaaatgaaactccagcaacttctccccaagatgttagttaatctgtgcggagccaggtcttctgccctcagctctgataaggtgctgttcccaatggggtggtatcggagaggacaggacaggaagctggtaaatcctgactatataaatgccctacttgttgtttttgtcaacctgacaccagctagcattgactgggaagaggaacctcacttgagaaatgtctcattacagaatgtctgtaggcgagtctgtctgacattctcttgattaatgattgatgtggaagggcccagtccacccctgggcagatgagcctaagcaagtcacggagagcaagtcagtaagccatgttccttcatggccactgcttctttcagttcctgcctcaagtttctgcttggactcccttccgcaatggcgtatgacccgagccttttaagttgaaatcaaacctttcctttccatgttgcttttggttatggtgttttatcatagtgatagaaactctaaggcaatatattgtactgtactatgctaaactacactatgctgtgctgtcctatcctatgctatgctatactatgctctgctctgctctaatctggtggcagagacctcagggtgggaacttgaatttaccccacccagcaacaatgtgatattcttctgcttttgtgcttcaatggaagccaagaagcaagccatacttccatatcatctgacaataacagtgtgtcaccatgctcctccactggtgctagcatagaaggcctgctaaaacagaagaactcaatcacatccaggatctcagcataatagcaagggtgctgaaggtacagttgacaatcactaaaaggaatcactaatcaggaaaaggaaaagccaggcacagtggcacttccttgtaatcctagtacttgcaaggttgagaaagaacaactaggagtttcaggccagtctgagcttcatagtaagacaaaatactgtctcaacaaaacaaaaaacccaagccaaccaataacaacagcaaaacaaagaaccaggaaaactagaagggacaactaacagataccaattccaagactatacaaatgctagcattatctgacaaggatttaagagctgtcatcagaaaaaaacatactttcaataagtaacaaaaacacactttaaacaaatgaaaaagtgacatttttaggcaagggtagttgatataaagagaagccaaataggggctagagaaggtttagcaattaagagtattgctgctctttggacccaggttaggttccctacacacacacacacacagacacacacacacagacacacagacacagacacagacacagacacacacacacacacacacacacacacacacacaaagtggctcacaaccgtctgtaacaacagttccaagggtccaatcccactgtcattggagggtaccaatcatgtacatggtcacatggtatacattcatatatgcaggcaaaacactcagacacataaaataaattagaaaaaaaaaaaaaaaagaaaaagaccaaatagagccaggcagtgatgatacaagtctttagtcccagcactcaggaggcagagaggcaggctgagctcagtgagtttaaggccatccttttctacaaagagagttccaggacagccaggaccgttacacagagaaaccctgtctcaaaacaccaaaacaaatgaacaaacaaacaaaacaaagccacttccagccaggcattggtggggcacgcctttaatcccagcactgggggaggcagaggcaggtggaactctgtaagttctaggccagcctggtctacagagcaagttccaggacaacctccaaagcaatacagagaaattctgtcctgaaaaacaaaacaaaacaaaacaaaacaaaacaaaacaaaaccctccaaaacccaaaagaacaaaacaaacaaaaaaccacttccatcaataagatcataagcaaaatataacgggtcatagaaaataaaatcaatgaacctgaagacagaacattaaacattaaattacctgatctgaacaacagaaaaaaataagctggaaaaaataatgagcagagccttaggatgtatgaagctataaaacgggttgggtttaaattaaaaggtgtttaaggaaatgactgtcagttgggcatggcgcagtctgacctcttgggagatagaaacaacaggattgtgagtttcaggacagcctagcctacataataaaatcttgtctaaaatataaaaatggaaacatttcataaatttcccaaaatacatatttaagaaacaggccaaaaccgcaaacagaagaatgagctttctctttctcattagaaggagcggaaagccaagatcaaccatgaagtcaggtgagtcacataaaaacaaacaaaacagctgggtgggggtgaggggtggcacacacctttaatcccagcgctcaagaggaagatgcaggcagatctctgtgtgtttgaggccagtctagtctacaacattacacagagaaactctgtcttgaaaaacaaaacaaacaaaacatggtaacacagcattacaggtcagtgttatagtacgtgaggtcccactcacagctgagtttcaggaaagtatatattctactgcagtttggatcatggatgtcccccaaaggcttatttattgaaagtttggtctccaccccgtacactttggggaggtggtggaacctttaagaagtgggcctttggccgggtggtggtggcacacacctttaaccctatcacttggaggcagaggcaggaggatctctgagcttgaggccagcctggtgtacaaaacaagttccaggtcagccaaagctgcacagagaaaccttatctcaaaagaagaagaaggaagaagaggagaaggagaaaacaaaggtagaggagggacctagaggctggagagatagttcagcactggctcctcttccagaggacatgggttcaattcccagcacccacatggcaactcacaactatccttaacttcagttccagagaattcaacatcctcttttagcctccacaggcacctggcatgtaagtggtacatagacatacaagcaaaacacttatacacattttacagtaaaggaactgccaacatgactgctccatttctgggaagacttttattgtgggtaagagagaaaagatccagaggagtctggaggagtccagagcagagagaaaagcagactggcctgggctagggagagagcagtggagacagcaaggatagagtactggagaacataatgactagaaaggagtgaaagagaataaaagtgagactgaggggggaggggacaaatcatgttgattataaggacagtagatgggaggagggactatttagggggatggcttcacaagttcttgagaaattctgacttttatctgtcagaaatcctatggtccagcttgagttcatttctagacatacagaggacccagaacctaacacatggagtaaaataaaatggaagagaatttaatttttaaaaaaagaagaagttgacctagtggaagaaaaatttgaaactggaggtaagtccttcaaagggctatttggacccctgttctttctccttcctcgtgattattaaatgtacaggtcttctctaccatgggctatcaccatgacattctacgctaacacaggctcaaagcaacagggcaaagtaacctgtggtgatatatattttttatgaccttgtaacaataaatctgtactccaagccgccagagccctgccgccacatgcgtgctttctgccaggccaccccagttccacccaccgctgccacgttaatgtcccaagtaacacacagagacttatattaggtacaaatgctgcttggccaatgactaggatttcccatctgctagctcagtcttaattatcataaatctatgtattttataagacttatcttatcaaggatgacttccactggcgccctctcttgccagcagatcacatggtgaatccagagcagagaccaggaggaagaacaagagaaaaaaggatggcttccttcttgtccttgcttatatatgagtctgcctgctatgtcacttcctgcctgaatcgcaagacttctttactacatttcccagaatccctcttgactcctagtcctgcctaacttgcttcttcattggccaatagtactttatttatcaaccaataacataaacatacacagaaagacattccccatcatgatctaataaagcttgcctggagatcagaacacaaagccagccacagccattgaggccagcagtggtggtacacacgtttaatcccagctctcaggagacagaggcagaaggatctctgtgagttcaaggccaccctgggctaaatgagagtgaatcagtctaaaagagaagcagagctcacacttttaatcccagcactaggcagagagaggaatataaggcaggaggagacaggaatgcattgcaatctaggcagtctgaagagcaatgcagtttagagatgcaatcagaggacaggatagccccttgggtttgagcattgatctaggtaagaactctctagtggctggctgatttgcttttctgatcttcagcttaaactccaatatctgtctctggggttctattactcatgctacagtaaccaaggactgaaacctctgaaactgtgagccaaaacaaacctttcttccttaaaaggtgatcatctcagatacctttgtcacagtgatggaaaactaacacacatatgctaatcaaatacatggtgatataattcattcaactgtcaaatcactgaagttgttgtttagggagataagttttgtatggatgaactttgcatgggtattttgtctgcatgtatgtttgtgtaccacatgtgtgctggtgccttgcagaggccagaagatggcatcagatctccaggggttggagttatgggcacctgttaattgccgtgtgggtgctgggacctgaaactgtgtcctgtggaagagcagtcagtactcttaacttctgcatcatctctccagcccaggagaggaacattaagaagaatcttgggttttcattctccaacaacatgcctattcacggtcctcacatgcatacatttcccccctctgagaagcatggcagcaaaattaggatgtgggtgtttcaaaatagattcattgtgttaatgtatgtattatttaaagttatttaaattaacattctactgaaagtagcatccagaagtactttcaacaaaatacaataaccacacaaattacaatttctacctggaggcggtccagctccatcatcagctggtggaaccaaataccccaaatggatgagattccttgggcaagctgtttgaatatgtttctgtatagcaaggaacgtagctaactttctcgtacaaatgacatgtgaaaagagctttgtttaaggaagtatttgttcaatcatcccctgtagtccttggaacaaatgggaagatattagcctccttacagagaagagcgagagacatgtggagggggatttatgttggagacccccaacctagggcaggagctgattacataaatctgattacatttctgttccagcattttaaagagtgtacagacttcattttaatctggtcatgcctatagatttatgatggagagtgtcatatattttaactaaaataaaatactatgtctagtggcagatctatgtctctgatagagctaaatagtttaaaaatttgcacttcttgtttttttttttaactcattttaacaaatgtttttacccctatgtgccaagcacaagattgcttcccacttttgaggggagtgggagtgttgtgaaacaccatttgctatatttttgtacacaagtctattatcagtttaatctcactaatcagagttttactccacctttctaggcctttgaatgattttgtttaattgttttcccacgtaagccacagaaatcaactatttattatttgattctcatcttagtgtttagaatagtcctaaatactttgaacatgaagttaaaaactccaagtaccctttgttcctctctgaataacttttgggaaagaatctatattccttgcccttccatcccagtgagatacaatgacacagctggaaactgagcatggatatatcaatatgtcaataaggagagataactcagcagttaagagtcctggctgctcttgcagatgactgggttcagttcccagaactcacatggaagctcacaaccaactgtgactccagtttctggggctcttctggcctctgtgggcacatacatacatctggacaaaatactcatacacataaaataaaaataaatatttttctttaatataaagaatgtatcacccaattttctcttccctaccctgccccagaaatcacagaaaccaaaacaactctgtgagttttcatctttttctccagtctgaacatgttttacatttagtatttttttgccccacacccacactccatttggttacaggaattttaagaacaagctacaatcaatcccaggggtatgttcagttgtttgctgttttgtccacaaagaaaatctagggcagcctttagtcccttctgacacacttcagcctgaacttgacaaggccacagcaaacagtgtgcctggcatttcatttgatgttctggcatattcttcagagtctgttagttttctgaagggctgttacaaaatgctacagcttctgcacagctaattgtgttggaacgagaaatatgatgtcatgaataatggctgtggcagtggagagggactgcccttgcacgccctcttactttacttgtagacagagttgaagtttggcactaggagaaatttattctcctggggctgtgcctagcacaagcttccagtgagtgctctggggtggggagcaaatgcaggcagttaattcaaatcaacaaaacctgatgagcccatctcacccaactgtgtctgagcaggtctgattctgttcacgtccatgatgaatcaacaaatcagttctttcctgacaccagagattttcacatttcaccataagaccctgacactgcttgcctactggtttcttttgtgtttgtttttgtcaacttgacataaacccgagggtgtggtcaggcacacctgtagccagcccctaagcaggcgtggctacagcatccccctacacaaacctagacatacctgggtaaagagaacatcagtgaagaattatctttaccagattgccctgtaggcaagtctgtgggggcattttcatgactaatgcttgataggagaggatggtgtcccccctgggcaggtggttctgagctgcataagacaggaagctgagaaagccaggcagagcaaaccaggcttctgtttccgttgctgcctccatattcctgccctggcatccctcaatgccagcctgtaagctgtaaactgaataaaccctctcctccctaagctgtttgtgaccatagtattgatcgctgtaaaagaaaggaaactggacccatgattaatgtttactttgcttttcccagttaggatgatatgatggctcggtatggtatccatccttcacagggcgtggggaattctgaatggaacacaagagaggagagggaaaaggtgagagatgagaagaaaaaggggaagccaaagataaaacacatgtttttcacatgtacgaggaagcatgaagacacaaagaaccacacagaaccaaagcccaaatcgcctggatacaaattcatttctttaagtggcaaaaatatgtgtccttttttttttctgtttttttgagaaagggtttctctgtgtagctctggttgtctgggaacttgctctgtagaccaggctgccctcaaactgagatctgcctgcctctgcctcacaagtgccaggattaaaggcttgtaccacaggttgggattccttttatattcttattaaatagccttaacctcttcatatgcaagtaaaataattgactaatccccaatgcaaatcaatacatttgcatgcaaccagttactgaacagtttcaagcttatggggtggtgtgctgctcatcctttagtggagttcttaccccatgtgcttgatgcctgggtttgctcatcagcatcacagggaaaaacaaaaggcccaggtgcattttatttgaggaaatcccgttctcatctcccctgaactcatgatgttctgtagacacctatctgcatcccagatgcagattagggcaaaagcttgcatcccagacttactggatcgatttacagtaagagttggccaatttctcacaatacctgaaaacaaagtctttaggtaaaagtcaatcttttctggattaccccccaccaaccttttcactggttgtctcatgggaaatgatgagccagatttttttttttttctgcctccatgtgtgtttgttgtgtgtgtgtcggcctcatttgaagtgctattaggaagatgattgtttttatgtcttctgttttgtttttttgaggaaagggtgttgatgctgtctggggtacaggcttgcattagttttctctgtcagttaaagaataggcaggtaagaagtagtaccaaaaatcttgaggattcatggcagagccatcatgtcatacctgaaagtcctgttgtgggtatcttagtttgattaatccaaagaattaagaacagactcaaaggcaagatcaaagacaatttataagaataaaatgaacgcttcagggcaggcaggccataaagctcacagctatctggaaaggaaggagaagaatggaacagagaaggaacagaagtcctgctccttgagataaagtggcatggaaattggctacctggcgacaggtggacggcaggattgctttagaaaaagagtaaggagacccaaaatatagagtgttcattactgttctattgctgtgaaagacacatgaccaagaaaacttccagaagagtttctctgggctctcagcttcagagggttagagtccgtgatggcaggaaggaggcagcaggcagctgcaacagcagtcaagagcttacatcttgaacaaaagcgggagatatagagagatcatttaaaatggcaagtcttttgaaacctcaaatcacccacccgtgcttcctccagcaaatgggaaccaagtattggaatgtatgagcctgtgggggccattctcattcatagttaggctctggccagtacctgaaagaaaaaagataagaaagggaaatagttaaaccttttttgagttaggactcagaaaagccagccgacctataccatatctatggctcagggacttgtagggactgtattaggaggggggaattctgagaaggaatctgccttcctaggggtggcctcctaaccaggtccctgatctacctgctccaccattaatggaggagacaaaggcatctctcacctagagctggattccatcctttaccttatagttctggctggcccagaacttgctaataaagggactagctccccattttggcagccataacagctgaacacgtatttgtctgaccttgtcttagtcactaaggtcagatgcagccctttcggcagccatgacagtaacacgtgcttttctgaccttgccttggtcactagaggttaggtgcctgcctcgtggcaaggaaccaatcagaagttagctggtggtggtatgctttatggctctgggtatgctttaaggacaagtacacagcaatgacgcacagagcatagcaaccaccctgggagggcctatgggccataacaaccagttggccaatcaacacagggcaagccctccaagcctggaggcacaccaatcctgagcctgtgcgtacccctagatactccccttatgctgccctacaagatctctatgcagcctcttcgagctgtctttgctagccatctgccatggcgggtgagtgaaagaccacagctaacatagggttagctccttaaacaacaataaagcctcatgtagtttgcagcaagcttttgaatccatctggtgattggggtgaccgcggtcctgggctgagaccccggaggcctgagttttatggggttctaacactaacattggcctcaagcttgcagagatcttcctgctttgacctcctaactggcagattatagtgagtatcaccacacctagtctatgtctttatggtttttgtcttaattattttcctttaagtattattgattattttttacagtaatgagaactgtctttgtttgggtttctattgctgtgaagaaaccgtgaccatggctactctttataaaagaaagcttttgattgagcttgcttacaggttcagagatttaatccattgtcatcatggtgggaagcatggcagcatgcaggcagacatggtgctggagaagaagctgaggatacgacatctggatccacaggcagaggaagagagtgagtgagccactggccctggcttgagcttctgaaatgtcaaagcccacttgatggtggatgtacttctgtgtatgtttatcttactgattgttaaataaaatactgtttggccaatgaggcagcaagttagacaggactagaagtcaaagaggattctgggaaatgtagtaaagaagtggtgatccaggcaggaagtgacatagcaaggagactcatatttaaagaaggagaaacaggaagtgtcccttttttccccctccactcctgctccagcggcacaatgtgatccaccggcaaggagggatgccaataaggcatccaataagataagtcttataaaatatataggtttatgatagttaagactgagctaacagatgagaattctagtcattggccaagcagcattgtacttaatacaagtttctgtgtattcatttgggccctaactccggcaggcggctggctaaagctcacacgtgtcagtggggctcaggcagcttttggcagaaagatttatcgtaacacctaccctccatgatacatttctttcaataaggccacacctactctaacaaggccatacctcctaatagggcccctacctaagagtctttgggggccatcttgcattcaaactaccacaggaactgagctcagaacattgtgtctgctagagaaatgtgttgccattgagctatatccttagacctttttgacttgagtcagtgttgtaggtttggccccctgccaatctgcaatggcagccatggcagtagcctaccgcattacccgatgctgccacagtgcattttctctgttgcagggctacaagagtttcatagaattgagtagcaacctgctcccatttaaagcagggcagtggtggcgcacacttttaatcccagcactcaggaggcagaggcaggcagatctctgagttgccaacctgttctacagagtgaattccagcacaaccagggttacacagagaaaccctgtctctaaaaacaaaacaaaacatcaaacaaacagacaaagatcccatccatatcagatcattgtcttcctcctcccccgtctcccagtctctgtctctatctctctctcatgtgtctgcactccaagatgagatggtctttctctctttccctcccccgttagatctattgtgtgtagtgatctcttagaacacaccttggctagcctgccaaatgtatctttctgctgctttatcctaaccgtcaaggtctcagtaaactgcccagatgaccaagtagcagggattacaggcatgtgcccacagaccctgtttttttagtctttgagcatatctatagtcactgtttcacacctgtcttagggttactactgctgtgatgaaacactatgacccaaaacaacttggggaaaaaagggtttatttggctcacacttccacagtattgctcattgcccaaggaagtcaagtcaggaactcaagcagggcagggacctggaggcaggagctgattcagaggccatggaggagtgttcttttctagcttgctcctcatggcttgccgagactgctttcttatacaaccagggatcaccagcccaggggtgtccccacccacaatgaggtggctctcttacatcaaacactaataacaaaaagcagtggttctcaacctttctaattctgcaaccctttactcttgtcttttcttgcaccacttggtctcctttctttctctcgcccatgactctttcaggcagcccccctacggaccctgaataactggacccctgggacgggtcactagttcctcatgttatggtgaccccaaccataaaatgatttttgttgtattttataactgcagttttgctagttatgaattgcaatgtaaatatctgtgtttttcaacggtcttaggtgactcttctgaaagggctgttctaccctcaaaagttgagaaacgatgccctacagactcgtctacagcccaactttatagttattttctcatttgaggttccctcctctcagatgactctaacttatgtcaagttgacttaaaaactagccatgacaacccctcctcaggttagggtgtctgtcactttggccctgtatcatcttttcttccagatgtgggtcagaagccattcctttttttttttttttcaagctgagttttattggatgttaatactttatgaatggtacattgtcaagtgttgacatttgtttttttctccctaaaaatcccttccttcctgccattcaacagggtctctctatgtagccaggctggcctcacatgatcttccttccctagtatctcagtgttggggtaacaatcacagaccatttatagtcagttaagtcatttgcaaacattactttagactttttaaaatattgaatctaagctgggcattggtggcacatgcatgcctttaatcccagcactcaggaggcagaggcaggcagatctctgtgagttccagaccagcctggtctacaagagctagttccaggacagcctccaaagccacagagaaaccctgtctcaaaaaacaaaaaacaaaaaaacaaaaaagcataaaacataaaatattgcctctagtatttcttttaaagtatctatagccccatatgagcaaagatgttcctgaggtctgaatggagaggactgaaatgtccccaagctatgtgtgaatttggcaatcttcactctttgccctgagggatttcatgctatacgtacagagtagcattgagcaaagaaatcaaggaggtccttgtgaaaatttctagggctctttcacacacagcttgttccactccatcattctgctcgaaaattttagccacttcagcagcatgaagctggtatttagttcttcctagctgggtgaaattagcatattccatttgagttttcttcccctatgtcagaatctaaatgttgcctcttatgagggttgccagaattagaaaataaaaatacaaccttgtatttttacaaatacaaccccaaaaaaaaaatgtcttttggttataatctcaaggcaggatagaaagacaaggacaattatggggacacaggaaggaaaaggggcccctgactctggagtctgatcgaggcttcccactggctgcttgccaagaattccaacccagttagcaacacttgtgaacattctatgcatagagataatatttctcatatatagaatgttaaaattaaaaaaaaaaaaggaatgtgaaaatagcaacaacgatccctgcttgagttctgagcaaatatggcctttcttctttcctggctatagacttgtaatttctggtactcccatgaggagaaactccatttacagtatgccccattaaagtatgtctcgatcccttgtgtaacccttctttttggctcctggttttatgttatcagattgtaatcctatccaaagcatccctttgccactctgtgatgtcatttactgaaaaagaggggaaaatgcttcctaacaacacaatctcaggtatgtcttcatctttcccggagcacctgtttcgaacctttatgcttgactctgttgaactaactttctaataaactgaatacattctgactgtgcttctgacaagctcatctgattttttttttttctgcagggctatcaaggatcagctctaaatgagtggaagtccctagaggatcagggctcctcagactatgggcagctgttctgtttcctgcttacttccaatgacaagctgagattgttgtgtatctgagatttaacaagatttgtctagcaaccctacttgcagacggaactctgggacagttgtggggctgatttcaattttctgtccagaataaaaatcttgaatatgctattatcgtaatagagctgtttcttgtatgctgttgagcttcccagcatttacaatgggagggtactactgtatgcattactccttggttagaaatagaagtccatagtgcacccacaaagctgccaggcatagtggcatatctatgatcttaacactcaggagggggaagcagggttggtagttcctggctggattacaggcttgcttcctacagtttactcaacccaggaccaacagtccagggatggcaccacccaccatgtgctgggccctctcccattgatcactaaatgagaaaatgccttacagctgaatctcacggaggcatttcctcaattgaggctccttcctctgatgactctagctgtgtcaagtcgatacacaagactagccagtacaaactgccacacactttgttggaaaataccattaggatacctaactttgtatgcgagaggggcaggtgtggtgggtcccgtaacctttgcactcaggaggctgaggcaggaggatcttgagtttcttggtcagcactggctacatagtgagtttgagccacgcctcacaaataagcatggtggtgatggacatggaaagtaaagtcacaaagtaaagtccactgtaaacacttggaagatgagactgggaggcccagaacagatggataaagtccacggtgtcaagaccagaatttaaaaccagttatttcttacaagaagcctctccctttccaatccggtgctttcttgggtcctcccacacagaccacagtagtctatgatccagtgttcttcttttaaagcagtccgtttcaagatgtcccatagatacaacacaggagagatatatgggagcagacagcttctttgaggaggtgaagaaaatgctagagtacctgacaggacaggagaaccagccagtggagtttatgaaattaaactagcagaactgcaagggctgaagcatgcctgtaggcagattctgtgcacctgtgcaggaagcatggtcactattcctctttgctcaccctgggaaaggggatcagggtctggcctgggtctagcaaagggaagtcgtcagaaaagcaatactaactgctggcagctggcaggtgggcttgactgggcactgaagtggtagcgagggctccagcaagatggcactgcactggaacacccaacgaacaatgcttgcgcagttgccatatgcacttttcatcattagaacaggattggctttaagttttatattttggttgtgagcctagcctttaacagctgagccatctctccagcccaaaacctttcttcttcttcttctccctccccctcccccccggagacaggatttttctgtattgctctaaaggttgttctggaactctctctgtagaccaggctggtcttagcttcaaattttaaagagcctttcatgtgtagcatctcatagggccatttatagaagcagtgtcatacaaatggaaatatcagacagaaaaataacttggtcatcagtactgaacaccttttaggatgttggatacatctggtctcttccatgaaacttgtgaatttcaaagttttcctttgtttatcccagacatccttattctggaaactcacagaactcatttggtgggataggcatgggagtggggacatttagatgtgggttatagagtattttgggatctcagtctgcatacctctttttcggcaacatacaactctggacagcatttagaaccccaccaaaggatgaatcagtggaatcaaagtatctatgggtggtttaaagccaacaattatgcatccattgacatgcatttaaaaatttatcactgaataaaaaaaaagagataaagaggaaaagacatgactgctcctagctatagaggaggagaaagttaactgtagataaaaggaagagcgtagccagagacagggatatgtgggagagtccagagtggacatgacccctagtcatgtgaggagaggcagaggagaaggaagatgctgcagccaagaaggcaaaaggtaaaagggtggtgggtaaccaaaatggctggattatatagaggagaacagcccagcccctgggctggagagttaagagtaggggtgggtatgagagcctgtaacaggtagggactgagggatgctgggagaactagagaactagcagccaggtccactttgagatgttaaataggcacctcaaccttttgtctcagggtttcagatttaataattagtcttgtctacacatatatgtggggaagttttatgtgtcccagtggtggtttgaatgtaattagcccccagtgttatgtttttgtttaaattagatataaagaaaaagagcaagcgcaagatgagatacattaaccagtttattataaggccatgtagagtagggagactaagagagaagaggaacaggggtaatggctgaccgctatggccggtcaccatagagaggcagagaaagtgtgtaggtgggagaagagaagagcagagcgaagaagaagcagagagatcgaagaagcagcagcagagagtgctcgaaagcagggaagttggaacttttaaagggaagactgcacatgcacactgaggttccacgcatgcccagagtccttatgcaggctgtaaatgcgtggtgggtaatgtggtgatggcacatccctgttcgtgccctgactgttgtcaggaggcagggtctgtctcttaaagaggtagagccgatcagcattaaagcctgaaccttttacccagtatcccataatctcatagggagtggcactactaggtatggcttctttggagtgagtatggctttgttggaggaagtgtgtcactgtgggggtgggctttgaggtctctttatctcaagcttacttctttgtgacagttgagttgacttcctgttggcctgcaaaatgtagcactttccactccagcaccatgtctgcctgtatgtggacacggtccccttcatgatcataatgaattgaacctctgaaagtgtaggtgagccaccctcacttaaatgttttctttcggcctggcgttggtggcgcacgcctttaattccagcactcaggaggcagaggcaggcagttcgaggtctccagagcgagtgccaggacagcctccaaaactaaacagagaaaccctgtctcgaaaaaacaaaacaaaagaacaacaacgaacaacaacaacaaaagagccatggtcatggtgtctcttcacaaaagtagtaaactctaagacagaacctgtgagtgcagattcccaagttatctagaagagagtgtaagctgagaactgaggactgctctctgtgagagcagtaagtgtccctaacccctaagccatttctccagctcacatacatttctgcaaagcatcatgtagtagggggaatgttttcttggtgatgtggtttaaatcagagcgttccttcctccttctccaaggtcaggtgaagtgtgctcattcctgggaagccacctgggcgaagccctgaaggacatcctgcagtcagaagtagaggatctgtgctcctcagcctgtgtttcaggacagctgagtgaacagtatctctctgagaacagcttttggcaatcatcactcagaagccgaactgctcattttaaaaactccctcagtcagcggggcagtggtggcccacacctttaatccaaagtggcagatctctgcttctgtagagttcaaggccagcctcgtctacagaggacaggctccaaagctacagtgggaaaccctgtcttgaaaaactaaaaccaaaacaaacaagaaacccaaaaaatcctccccacattaagcctttattctgcgttaatgcaaagcagggacctccaccagcagaatgagatactgggactgatagaagccatgaatttgaattggggaggagcacatgggaagagctggaggaaagaaagggaaggggagggaggtaaatgatataattaaatgttaataaaaacaaaataaaaacatgtcatcaagtccagctagagttgcttttcagttgtattcttgtgccatcttaagcaaaatctaatattatagtacttcttttataattgaactttccttacaacatattaaatctttattagcatgctaataattaatttttaaacaccagaaacctgtcaaataaaatttgaatcattaccctggccgagaagcactgaggtaaaatagaagggggttttcctccaggaaaaataagcatggtgttttgccacttcagaggaacctttcctgaaaccaggggttttcatttccttttccagagctgtcttgcctctggcctctctaatttaacccgctgaactaggaagacaaaggcagcatgtttagggacaataggcacagttggagacaaagagtcactaaagaagggcaggattagagctgagcaggatgggacaccacaaaagatacttttggtctcatttgctccaatcctccagtcttggcattgtcttagtgaaccatcattgtttggttgcttcaagctgtgtcatatcaggcatgcactgctaatgtctctatatagacattatatatgtatatatgaatatatgcaacacacacatacacacacacacacagagagagagagagaatgagagagagagagagagagagagagagagagagagagagagaacatcaccaggacagctttgtgatggttagttttgaatgtcaacttgaaggagtctgggagagggcccctgggtgattttcttgttttacttcaatggaagcgagaatggattaggaagagagtgggctggcacttagcaagcaagcattcattattgatctctgctccagccactgcaagttctgttgcctggatttgcccaccgtgatggatggtcctctgaattataagctgaaacaaaccctttctcccttcagttgcttttctcaaggcgtttttagcacaatgggaaaagacactaagacagattctagttacagagttccattccatgaaatcagtgccttttttgcaattccaatggtaaaccagcacattttgaaggacaaaaatctagctaaatcactaaaaattatttgtggcattatactctttactccacatttatatacttactactacacaggttaccaggcactgtgcagcaacttcctagaaagaacagacttaagagagatgcccctgactctcagtcacatctaggaatgaggacttgagcaaattacttccgggagacactggtaaggtgggtaagcacagggaaccccttagcaacctgggactctacttggcttgggctatgcactaccttattttaatgaaaacacaatgacatcactttctcccttcctttgcacgtggcagcctgatccctgtgcacacccccctccctgaataaagcacctagcaactttggactcccactgaacacaaccacacacacccttccctggcttcttttaccttgacaaccatcaaacttagcttctattccagtctatgctccttatgtctgggtagaatggaatggctgacagccctgaactggtcttggatgcatgctcaataaggaaaagttgtggcaaattaaattttatggacaaccctgtctcaaacaaaaattttagagacaatattccaatttaccatcttatgcctctgcataattgggcatgcgtcttggaagggacatgcactatgaatgattgtgacctaatctgtcaaaatagataaccacacaaataagcccctagtgatcaaccaaattccttctctctttaaccacttgtaagagagccccaagcagtaactggacctgtcctctactttctcatgtggcctgctgttatgttgcaatgtgtcttctgacctgtcctagaaatttgctttaaatagtttcttacttgtgcaatttgtgtgggcttttattttagctcgttgagtaagaaaccagggactgggaagtactggatctcaagccaacctctggccacactgggaagaatgggaaagactggtgtagccaccagaacccttgctcccaagctcatttagattctttttgccattactccctgctacttcgcttggtactccggcacctctgaagtacagcaacagtccagatgtcgttacaacatgggtataaaaggtgccaagggactgatttctggtcaactcctgttagttaatgcagcacttaaaccacttgagaagagcttcattagtttgcatctgaaatgtcccccatctgaagctgctattcaagggttggagacttggagaggcaagcctggctggggaaggatggtcactatgggtgggcctttgaaagtcattcagctcctcagttccagagcggctctgcttcctgctgtgctgacatacacagctgccactgcaagctctctctctccaatatgcttcaccacccagggtgggctgagaccctctgaaagcattaagacaaaagagactctcttgttttcctcaggcattttgtcatagcaacaccaaagtaactaatagaggtttcaatttaccctccctcccccccccccgactttttgaggaagacaacctttcactgtgtaacccagcctgacctggaactgtgtagaacagcctggccccaaactcagagatctgcttgtctctgtctccagggcgacaggattacaggatatggattcatgcttaaattattcagatttctttctttctttctttggagatagggacagccctggctgtcctggaatgaattcactctgtaacccaggcaggcctcgaactcagaaatgggcctgcctgtgcctcctgagagctgggattaaagtgttagacccccgaaaactcaagtatccggggtcccaggccacgttcgcggtcaccccaatcaccaggcggattcgagagcttgctgcaaactgcacgaggctttattgtaatttaacaagctaaccccatgttagctcgggtttttcacccacccgccatggcggatggccaaggagctcctaggggctccgtaaggggagtgtctaggcttacgtacgcacaggcttacgattggtgtgcctccagccttggagggcttgccctgtgttgattggtcaactggttgttatggcccataggccctcccagggtggttgctatgctctctacgtcattgctgtgcgcttgtccgtaaagcacacccagggtcgtaaagcatagcgccaccagctaacttctgattggttccttgtcatgagacaggcatctgacctctaagtgaccaaggcaggtttatggcaagcacgtgttcggctgttatggctgccaaaagggaagctggttccttcaaaaggagtgcaccaccacttattcttatttacctcttattcttgctggagagctcatctattctcctactgaggcattcctttgctagtattcaaatatacttcttcagggttccaatgtatctcaaagatcagctgagaaatccttgtggactgaacaactaccagatttttgaactgctgggagacagtcattgttggactagctagaccacagtgtgtaagcaactctcataaattcccttttagtacacacacacactcacacacacacacacacacagtctatcagtagtttctgttattcttttgtttaaaaagaagagaaatgctgagacatgagacatatttactataagtttattataaggcctggcagaatggggagactaagaagaggaacaggggtaatggctgactgccatggccggtcaccatagagagagcgcataggtgagagagagagtagaaaggaagctgagaggaaacagagctggggaaacagagagaggaaacagagagcgtaaatgggcagggacttgtcttttaaaggggtcctctgcacctgcgtgcagacttagttcccatggaaccttgggctgaccagggtactgcctgttccaccaggtaacaggagcaggccagcataatgccagaacctttcattcccacctctacttattattaaaaaaaggtggggtgtttagacatggcaggttaaggaataagggcgtcaaattctcaagactgcttcttgctgacgtggggggcattgaccatctttgggggatccgagaaggttggggtgctgccatgtcctagggtagctggttgtttcattgcagttcaggctgtacggaactccctggtgcttcttagacctggcaagatgtcgacagagcagaggacaaggttaagtttagaaaaagtttttttttcttaggtcctgtcacttgaggggaagattgtaagatgaaggagggggttcccgatgagtcccaagatgagtgaaggaattttgggaccggggaaaggttgaatattacctggagtgaatctgacttgtttggatctgattcggctccctggaacttacaagaatccttagagtttgtggaaacataagtattagacatgttagaagcatattcatgttagaagcaacttggctgaaagtattaccatttaaaaatagacagatttttttaggacaatgaaaagcatcttaatcctgactttgtagttatgatcctatagtggtattggtgaactttattatgaacagtagcatgagaaatagagaaatcaggaacatattttattctttttaatgtctcaacttattttatcatcacttaagcctttatatcctcaggcctttgtaactacattctcagaccttcatacatcttagactttcctatctttacatagataaaccctaaaatacctgttactggaatctattttgctttaagctggcaagactaccagtcgtcaaaagcatcagagttcttgagaaggataagattttacctgaatcaatgattaaagaataacagagacttgccagcaggctgcatggacagccacccccaaggtcctccatccatagttgtgggctgcaggacacctgccttcttgctgatagcatgtgacctgtggattacagactttgggaagactcgcctactgttagcccaagcaacgcaggaaagtcgattccgttgtcctcttggccagggtctggaatactttgtagtagttcaggtgaagggcagggttgctcagtgaccagtgttgtcactgactcgagatgaagttccttcagtgcccatcagtcttctcggaggaaatggggtggggccagcagctggtctatctctctgttataaaaagctttttaacaaaacattttaaatgccatattctctagatctctgagcaattgagggctgtctgcttagtatcttagcagttaagtttgcctttagttagagaaaaatccctttttgtaataaaagctgtacctttgtaaacggcttataggatagactgagtggtataaatattttgaaatagatctttatgattttaaattttcatcatcatttaaagatacatgagttaaatttaagttgtatagacttagcttatattttaagtatagttaaattagacgtttatgactttaaatgtttaccatcatttaaagatatatagcaatttagaaatatgagacttaacagtttaagttgtatatagagctagataagtataaaattaaattacaggtacagagacaagcaggactggataacagtaaaggggggaccagaatgtaatctctgatccatacattgtagcaaacagacaggagatttaaagagacagggtagacttaaacagagggccctggaaaggcacagtatttggtaaacaagccatgaacgacagagccagtgaaagaagaaatcacagacaaaaaataaaaagcaaaaagatctggcagaaatcaaaaatctggtagacaggtttgctggcacaggccgctggagtgggcgtgcctacaggtaggtcacatgaccaagacggcgggaccataagccgcttttgtctgtttaccttcttgttggatgaaaccagaaaggtttctctatgtattttccatgggtgaggcaagtggaaaaccggcaaaaagttcctctaccgatgcacgtctgcccgtgggaattgccaggggcctggcccctaaggggacacagctgtcacgaaactgaaaaaggacccagcggtccgaactgcccatgcctgaccctcagaaaatgcacccaacaagtgaaagaagaaaccattgaactgagtcggcgccaaaatgttattcttttgtttaaaaagaagagaaatgctgagacatgagacatattgactataagtttattataaggcctggcagaatggggagactaagaagaggaacaggggtaatggctgactgccatggccggtcaccatagagagagcgcacaggtgagagagagtagaaaggaagctgagaggaaacagagcggggaaacagagagcataaatgggcagggtcttgcttttaaaggggtcctctgcacctgcgtgcagacttagttcccatggaaccttgggctgaccagggtactgcctgttccaccaggtaacagaggcaggccagcataatgcctgaacctttcagtgtccctctacagaaccctaattaattcacactaagtaccactagtggggcaggtcttctgacttcaaatgatccaatcaagaaaatttccccaaaggtgtgcccagctgatgggttttagttgattccagatgtagtcaaggtgacacaagattagctaccgcacaggttgtcactgtacagtccacataggcagcaaatgtgtggtgatcttctgcttctacttccagagcgctgggatcacaggcatgggccacatgtccaacttcctttctgtcaacgtactcagggattcccaccagcagcaaaatgtttcttagctggatgttcgagtactcacctgaactttctctggattctgaaaatttctggtcacatttattagacttacggtatattcttatactgtttttccaagctgcttctttttagtattaataaactcattctttcatattcaaagttactctaccagcagtggaggagtgttcccctttctccacatcctctccagcataagctgttattggtgcttttgatcttagccattctgattggtgtaagatggaatctcagagtggttttgatttgcatttccctgacgactaaggatgttgagcatttcctttaagtgtctttcggccagttgagattgttctgttgagaactgtttagatctataccccattttttaattggattatttggtagtttgatgtctagtttcttgagttctttgtatattttggagagcagcactcttgtcagatgtggggttggtgaagatcttttcccattctgtaggcagccatttagtcttgttgaccgtgtcctttgctttacagaagcttctcagtttcaggaggtcccatttagtcattgttgctctcagtgtctgttctactggtgttatatttaggaagtggtctccagtgtctatatgttcaaatgtatttctcactttcttttctatgaggttcaatgtggatgaatttatgttgaggtccttaagccatttggacttgaattttgtgttaggcaatagctatggatctatttgcatttttctgtatgtcaacatcaggttacaccagcaccatttgttgaagatgctttcttttttccgttttatattggcttctttctaggcagcttttcctttttgcctctaggctttttacttttcttacttctgtgtatcttaagttcactcttactccatggctgcctgtgtagctaggtgactggcccctgacatcctccttgttcttttcttgcttcttctctttgcccagatttctcctcctattctctcttcctgccagccccacctatcctctctcccatgttgccattggccgttcagctctttattagaccatctggtgttttagacaaagcttcacagagttaaacaaatgcagcgtaaacaaatgcaacatacctttatgcatcattaaacaaatgttccagaacataaacaaatacaacacaccttaaaataatattctacaacagaaagtttcttaaggtgtattttacatgtatgtgcacgtgtgtgctagtgtccatggagaacagaaaggacatcaaattccctgggactggagttaaaggcagttgtgagctactcaatctgggtgctgggaacagaactctggaagggcagctcttaaccagaaacccatctctccatccctctgtgaattacatgttcttcagttagcagaacccaggctgcttgacttctcagggtcttctgtttgcatgcagtcctttcacagttatagtcccaattatagttcctgcagctctcatagtttagaaaacaagataactaactgtattcattacgtctaggactagcagtgtgcccaatcataggatgtgtgcttagcatgctcaaggtctgagttcagtctcttgtaacccgttaaaagtgtgagacaaggctaggctacatagcaagacctttttgaagaaaacaaaaacaatcataaatttttgagaaatagcaaaaacatgtcttgtcctagttttcgagcaatatctaagtgattgagtatactcaaatttgagaaactacagagaaatgaacatgtgcagtggtactatgtcactatttagtttgacaggagcagtcagtgactgacaggtttaaacctccttctaggtcaaagacaaaaaattggtcctgtctcaaccaggtgatgggagacatagttgacttcctaggagaagccttaccctctttaaggagcccatgaagttgggatgagggggagaagaggagggaaggggaaccggcattggaatacaaaataaataaaactcattagcagtaaaaaatgttatattcagcatgaaaaaaaaaaaaaaaagactccctccacatgtgacttatttgggagctggatggcattccccccaaagtaaaaagccaaaaagcaaagagtaaaaaacaaccaacaatattttggtgttgccacatgggggtagagtaaaagaaaatgcaactaaaactttcctaaggaaataaaaggaaatgctcactccagccggtttgtggtggctcatgtctttataataccagcactcggtaggcagaggcaagtgcatctctgtgagtttgagaccagtctggtttacaagagctagttccaggacagcctccaaagtcacaaagaaaccctgttctgaaaaaccaagaaaaaaaaaaagctatcacccaacagtttttttctcattgtgtttatactctttcagaactccactgcatttcaggttatttcacacctaggtttctcttcctttagtctgtgttatactgggtttttcaggaattttaatcatcatacttttcttatggagctggatatcccacccagggccaagcttaaccaactcacacttagcacttcatatgtctcctctagttcctcaggtttgtggagggtttgcttagggcacaccatgctcaggacactctactacctggcccacccagacttagggatgacccttgatgagtatcacatgactcagctattcttgcatttttattttctcacagtggacctagaaggtttagagacctgactgacactcagaagggcttgaagtaacaaagtctttaatagtattatagatggcttctgattttacaaaagaaacaatgtacttaaatgcaaatgtttcacctgattaaattttgtaatacagaatgctaactagaagttttgatttctagtttatgtatccacttagtatgatagttgatcatatatatatgatcgtatatatataaatacatacacacatacatatatattgttctttttgtaacaaggtgtagctctgtagcccagtgtggctgggaacccatgacaatcagaactctgggattacaaactcttgttttaaaattctgattcaggtcgggtggtggtagcacacacctttaatcccagcactgggaggtagaggcaggtggatctctgttaattcaaggtagcctggtctacaaaactacagagaaaccctgtctcaaaaaacaaaccaacccccccccccaaaccccaagataaaattctgattctgattgccttatgtccacaaatctgcccgttggcccccccacaccaattcaaaattgacttaagcagttcctttggaatgtattaaaatttttatttttgtgcactagggatcatgcaggggcttgtacatgatggcaagcattcttccatggagctttcatttcaactgcttatcagtcattttaggaaaaaaaaaaaatctaactctgaattactgaagtaatattgcaaaacagcatttcgccccccttttccagtgtaagaatttgttttctacgataaggtctactcagccccttctggcaggccttgaacttctgctcctactgcttttgcctcccatgtgctcaaagcacaggtgtgtgccttactgcctggctgaactttttcttaaatcataccattaaagctctttgtgtttgagtgttctaattgtattatacatgtttagtcatggcagccaagaggaaatagagtccaagtccatctggattttcacaagccaattaaacagctgaacaacatttgtagactctattcttcctgttttttctttttgtttttaaagctcaaatgtcaagtaggtcacttccaggccagtggtgtttgcttccttctgcagcattactcatctcctatttagtcagaggcatcatctgtttagaaatgggataaacgttgcctctcatttctgtagactatacctcagtctaatttctagtgtaagtataaattgttctcaatatgtcataatttgtagtaaatgtgatactcttttttatttatgtggccatacttattaggtgttgacatctaaaaagatgctatttcacctagtaaacatgttagcattaattaaattcacaaatcattgagaaatatgaaaggaacaacttactgctattgaatgaataaccagctgataatgaaaaattagttatttaaaatatagagttaagcattggagagcaaatacatttgtgttataatatccagaaggatcattggggtaatcccagcactcaggagacggaggcaagaggactgcagggtcaagccagcctggactgtgtagctggaacccaaaatgattacagtactattacttaaaagataatgggatctagaagctttaccacaacagtgctcatgaacttaaccgtagagcaaacaactctctcatctgggtttgttactgcacttgtaaaattcagggtcaggctgtatgatcactaagctcaagatttgcaggtttactggttttccgttaatgtaatacttgctcaggaaaagctgctcttaagctaagttatggtcatacagaatacaaaatgtaccaagaatatgacaattgctgtcaattataatttcaaaaattcattaacaatttatttctttttaaaatttcatgtacatttgtgttttgcctgcatgtatgtctgtgtgagtgtcggatccactggaactggacttacagacagttgtgagctgccatgtgggtgctgggagttgacccaggtcctctggaagagcagccagtgctcttaactgctgagccatctctccaggtttcattttcatttattcaggtctcaaacttaacagctatacatacaagccattaaggaaaaaaaatgactacattatatttgtatgtatgtacgtacgtacaaatgcacactctctctctctctctctctctctctctctctctctctctttctctctctctctgtctctctctctctcacactcttacataggacaggaaactggtaaaaaaaaaaaatcaacaaaggtccaggttcagaaaagcacaacactgataaaccactttatgctataaattccagatctactaagaggcaagtttatagtactaatgaacctccataaaaaccaaccaaccaacccataaagatttcaaatatacaacttaacatcatctctcaaaccacaaatcaaataaaaattagcagaaggaaacaacaattgagataaatgaaataacagaccaaagcaaacaatagaaactatcaatgaaatagttggatatttaaatttgtacgagacagggtctcactatgtagtttaggctgacttcaaacccaagacacacttacttaaacctcatgagttttaggattacatgcataggtctctgtccctggccagagttagtttttgaaaagacttgacaaacctttacctggactaaccaaggaaagacgtgtgtatgtgacaacaaataaaagaggtgaaaatgggaaatttctcaacacctacaatctactgaaatagatccataacacaaaaccacctgaacagaccaattaacagaactgaatctgcagttaaattttccaaacaaagctctatgagatggcttcatggatgaattgttaaatttaagagaattcacatcagtttctttcagccattctaaaggaatacaggggaggtaatatttattacagtttaaataggaacccccctccctatatgtgaatacttggcatctagctgaagtgctgtttatggagactgtgggatctgtaaataaaggatagcccagttggaggaagtgcctcacaaggaatgagctttctgggttatcaccccatcggagttctgggccatacttactgttcatcagtgatgtaaccaagcagccatattctcctggtgccactaaatctaccatccttgctaagatgtatcctctaatgccaagccaaaacaaacctctctcctttaggctgcttcttatcaggtattttggcccaggtaacactttctaaacccattccaagcagttggcactacacaaggacacaacacaagaagctagtaagacaatcagtgatatacatacacagatttaggctgctcaggagctctacaggtcacatggatgtatctgcaagccaatgaaaggcctcacaacacgaaccaatcaataccctgctcttggacatctggtttccaaaagagaatatacaactttgttgtcaaaaaccaagatgctagcaagttgaattcaacaacacattttttaaaaaatcattaagttgtttaatcatagggatgagcatgcttcaacatatgcaaatcacttaattagaacaaatgattaaagatcatatgatcatctcaaccagtaaaaaaaaatgatctgatatagttcaacaatgcattgtgacaaaaaccctaaacctattaagtttggaaagatcaccttttttgtcgtagcacggccggtctcggctccaagccacgacaaccatgaggttctgcctgagtgggagatcgtgggcttggaaactcctagaaacccaacatcgattaagaccaaacacaggcttcttgtcatctttagagagctctcagtttcatgctgtaaaactagagtctcttctttatttagcaactttttggctgtttcttaaccatgcttttatgactacaaggaggccatttctgtccttctgttgactcctctcttctggatggctcctaactctctgtcctcacatgttacttacacacctagcacctctgcctaggtgcaggcctattcaaatgcttaggcccatagagatgcaaactaggaggcaatctaccctgaggccatggtaaaaatagtagacctgctggcattagcaatacaatagtgggctggagcttttgggtgctcctgtttgctgaagccgggagactggaccttaagacattccataatggaacttttctaccgtccccgacacaccttaacctaacaaagtacatatgacaaaccctcaatcaacgtcacagtgagtgggaaaaactgaaagcattatcagcagcaagttagaaaaattacacagaagaacaatataaaatgcatacaaataggaaggaagtaaaattattcccatgtgcagatgattctgtatttagaaaagcccaagactccacataaaggctggaattgataaacaaattcaataaagcaggaaacaaaatccatagcttttccaaataccagtaagaaatttgctaaagcagcaggtgctggcggggcacatctttaatctcagcatttgcgaggcagaggcaggtggatctctgagttctgggccattctggtctacaaaatgagttccaggaaagccagggctacacagagaaacactgtcttgaaaaacaacaacagcaacaaaattggctaaaattatgacaacaatctcattcacaacagctgcaacttaaaaaataaacttaaaaaaggagtgaaaatcttctacaataattataaaacactgatgaaaaaatcaaagacacaaaaagtaaaatgcagatactttccatgtttatggattgaagaatcagtaaatattttttaaaaagtccatactacttagtcatctacatttcaatgcaatcctcatcaaaataacagtattattcacagaactaagaactagaaaaatcttgggcaaaataaacaaagcaaggggcatcacagtaccctagaagacatactaataatgagtcttaacgaaaaaaaaacatgctattgccccccagaacacccccatcaatggagacagagatcccagagataaacctcacaactagcatattcacaacaaagggaccacagacactcgctgagcaaagggcagcttcttcaataaacagtaccaggaggctggatgtcaaaagggtcttgtcttctaccccacgcaaaaagcaactcaaagtagattaacgttctaaaagaaagagccagcactctcaaactacaagagaaaatagaaatgaactatttcagaaactggtataagcaacgactatctggataggaccccaaaactcaggaaacaacagtaagaatcccacgtgtgaccacactgaataaatctgctgttcactgttaatgtggctcttttaatgggcttattaagattgtatgccaagcctggcttgttagggctgccagggaacaggttctgaccttaactcgggcaagtttttagagagccaggaagggctctcactggatctctttgcctctcctcaatgtggctatgttgattacatctccaccccagacttactttttactactgtttaattggcttatttaagacctggcttattgggagtgtcagggctcaggctctgactcattaaataataactatagtaacaagcagattagtgaacaagaaaaatgtgtcacacacccacaacagagtattacttaactataaggaatgaaatcctgccatatgcaataaaatggatggaattaaagaacattatgttaagcaaataagacatagaatgataaacatgggattttccttttctatacagatgtttaaaaaatgacctaaaagtaaaatactggagccaagcatggtagtgcctgcttttagtctcagcactggggagaggtgcagaggcaggagcacttccatgagtttgaagccagcctggtttgcatattgaattccaggacagccagagttacacagtgagaccctacctcaaaaaaccataaataaataaataaataaataaacaggattgttattgctagtgaccaggaaggtggtagaaaacagaaggttgcacttgatcagcccagccatccacatagtgggaatatcaaactaaccttcttaaatatacaattagtatgttactacaatttttaaaaattgtaacagaaaattttagaaatgttccataaaggtgtttgattgttactcttttggtgaggataaggaattgagaagaaggcagacaagcacagtcaagtgatacatttgttgttttactgttaatttgacatatctgaaccaaagcattcacaatacttgatatactttaaagaatcatatactagtgtcttagacataaccacagaacaagcagaacaattaaaactacataaggccttaaaaacatccacagtgtgtattatttcaattctcattcattacaaattagactacataccattagtttaatttttattttactttcatttattcaggcaagattcattcaaggaaaggcaacttagtttttgtgtgtgagctttatttatttttactatactggttaatataaaatgtatgacatgttttcttatcccctgaattcaggagtgaacccatgacattatcagatagtaatccaaaagaacaggccctactcttaaaaacagccaaggtggaaagggaccagtgagtctgtctgtagtcttgaagaacaactaatggagtttcaagtattcatataaggaagactactacaattctaataattagtcaaaattttaaaacaacattgcatacaaaatcattcttgaagccctaaatgtcttttaaataactgaaaatcttaagtagttgtctcacagtaccaaacataaatcaaaactagttaaaaatcagcgccatcaggacttctcatttacacgatgaatggctggtaagttaacagatggcataaaaattaagacttcatttttttttttaggataatgtactataattggagaatacagaaaagttaatgtatttttacaataaaataaccatttaagcctctatccctgtacaacagagcataggtcactctagttaatgtgggtgctttcatagttttgtttttttacagtttattctgagtacttgaattgctttagatatacagctttttgaaagaatattatatttgtataccaggatatttagtacattgagatgtttaaaaatatttataaatttgcttttgatatgcaaaagcatttggcaatacttttacagcatctgattttatagaattaaaatttcatacagtactcatcttgatgtttaaaaaaaattcacagaaaaaatataaattacacagcctgactgcatgatactgctatttccagtttctagttctggtaattaaaaccttcattaagtctgttaacaaatcattacctgtacagttatgaaggcaacatacatgatttgtaaacaaaaccttcaggttttatgttatttaccaaggagtgcagttcagcaagaaaagaaaacccagtatgcaaatttacagagtagtttacaaatttaccagttcctgtgacacaaactgttttaacctctcaaggtattgtccgtaaagctccacgtcattgtgtcctgccccttcaacccacagaggctccacaggtctttggcaacgttcaaataacgcgaggccatgcgaaaagtcaatgacttcatcttcagtcccatgaattattaatactggagaggttatcttagagattttgtcaatactggagagaaaaagagaaaggaagaaaaaaaatcaatgaactatataaaataggaaagaaaggttcctgtgttggaacagaaaatttaaacattagtttacaaatcagctttagggatagaagccactcaggtccgagtaggatccagaagccacccaccctttcctagtgctctatgggtggaggaaggtacctttgcacatttgtactgctccagtcactcactgtcatccttacctacctcaaacacctctctacaatgctgagtttccccgagcctctaagacgtacaagtcaaggatgacacttgacaacactcatttaattccctgctgtgctcattttattctattagtcactaaaattcaaacaaaatgttttggtttttgttctggtttaagattataaactaacaaaaaacagggaaaataatgtttaaatctgaaaagcatatgaatatataaaacaactgattaaaaagatacatgaaaacacaaagttaacagacggcaaagtgaaggagcaagttaccatgggataccccagaaggccaaggttgccatggagatgaagggggaattgaaacatgaaggaatccttcaaagtctgtttaacacagttaaggtccctcttttccagacttgttggaaaagctgagtaactttcttctttcaactttggaaggtctataaatgcaggactccagcttagaagagaagtactatatcacacaacacacaaaaggctggctctgtgggacctgtttggcttctgagaatgctggctggcaggcttcctcatccaaggcagagttccacagttttctttgcacagtgtaccagagtggttctttggtttccctctcttacataagaatagagagccaagaatgatcagatactaaagagaacccttcaaatgtatgatggagaccaaagcaaacaattttcgaaaggcaacttgggaagagaaactatgtagaggccatcttacaaacatgttttctgtacatgcttccctccccacagagaaaacactttgattataaagatggaatctttttttttagaattttccttggtttattttttaaattttaaaaactattttaaaattgtttattagtgcagtgtgagagtgccagatcccctggaactagagtggccatgaggttgctgggaattgaatgcaggtcctctggaagagcagccagtgctcttaatctctgcgctgaccctccagctccaagatggaatcttgttactcagagaaactggactctcaaggctctatttcctaataaacaatacagacatgtaaccatagaggaattcaagtttaaaaatggtatattttctttttcaactagcttatttctgggaaatgtctaggaatgtcaatcatgaaaaggacagaataagtgggttgtgcatcatcccaaccaactctgtaatatcgccatcacccagctaaacagactatgttcagtggtcagggagccccaaggatctaccagtttctctttctgacccctcaccagttttgatactaacatttacatgtgagcaccactaccttttttttttttttttttcttcaattaaaaatgggttctagggattgaaccgaggtcctcatgtttgtaacaactctctggcccaacaatgaataaatactttttgaaataacatttgctcttctgctaaagaaccaagtgatgaacttggcttctggtctcccattcacaaaaataccctttgtattcctgccaagagaagaaagaccaaatgaaaagtgccagcttttcccttcttgccttctccctgtccttgagaaaaataggccattaacttttttccctaaatatgaacaaggcaggtggcaaccactcttcgccttggaaagaagaagtcctcctttcgaatctatccattactatggcaggcagcaaactttctccagctacttaagagtcaactttctttgcaagccacatacaactgcctgagtgttattattcatcttccctccactcattcttcttttcccatgctgtgcatctcactaaatttcatattgttttagtacctcaaggcaaaagcctttgtcaagttgttctttgtagattcctacatccaacctactgctctgaacccatttatttacattcacaaattcattctcttgtttccagcgcttgctcatgcctgctgcagcttaggatctaagctcccacttcatcctcaaacattccagcttgttttttatcagtcacgtgctaacactctattcaagctagtttctcacaattcctatgtgatcaattacacgaagtagaagctcaatgatatattttattatacggttcttggaatgaaatgattttgaatgttgaacttactttgggaatgcatcaaagcagtaggtcttcttggtatcagggaaagcaactcgcattcctgaggtcaaaggagaatgaagaatgacagcagcactctcataccgagcagcaagatccacagatggtactgtccctatgctctggccatatataatcacattttcaggacgaatgccgtatctaagaaatacagaatttcaaaagatatagttggactggaaggaaatattccattatttgctacacaatgtctcacaatgagacagtgccaatttaaaatttaaatttcttagctatcatttttaatgttacaataagctctataatctgaactgtccatgcttaattctaaggtcttttaaaacttcaattttatgagaaaaatgtaagtcattcattgtattttaagtttggaatatattgtaccatgtatatttcaatggactatcagttaatatttagtgtgagatattatttttgacccaatagagcatatgttcttgatttctctgtatatcaagagtaggttatatgattttctgaactgggtatactgatgagatgctgaataaagctatggtatggaaagaatacagaacctatacaagatcaaattagagtatttcatgaaatctctgtatggtttattcacagagatggaccaaaacttacaaatataatcaaatgacccagagctccaaatggtattaagttaactaggaatagaattcatgctaaaacccttaagagtgtcactttatctcctttgacagcactacagatatatgtgaactcactgacttcataaaaactgattggctacctaagatgctccaggaagtgctacttgtttacagggtaatcattccaattgtaaactacttcagatgtaggtgaggtgccacaggagctaaaggtgaaggggctaaaggttacagagaatgccagtatgctgttccaataagaaggcagagtggtaatttctggcagctaagagggtttggacagcagtgtataatcttttggagaggttaggggaatttttgagaatctgaccatttaccaggagccagtcctcctatgtccttatccaggtactcaaaaccagttttactatccaggcaacggcgcgccttccacagcttcttcatctgtcctccacaagcatacagggtaccaccagacgtgagttccacctatacctaactgactagacatgctacttaacccagaaaagctctcagtagccaagaagctcggagtatgagcatctgaaacatcagcacatcttttgagaccatactattgctgtcagttgcctaaaagcactgcacatagcaattctaggtttggggctaatgtcagcaatatcaaaactcaaaaggagcaagagtcaagaggttctatctagttaagccgggtggtggtggctcacgcctttattcccagcactcgggaggcagaggcaggcggatcctctgtgagttcgagaccagcctggtctacaagagctagttccaggacagtctccaaagccacagagaaaccctgtctcgaaaaaccaaaacaaacaaacaaacaaacaaaaaacaaaacaaaccagaggttctagttaagcagtaacaatttgagaataatgagttaaaaagaactctagagaccattcattctacttaagctgcacaatgaccagatattcaaaatcactgtaagttgatagtaaacctatatttagaacacaggtatgctgacttccaatccaatccaagtcttttcatgaaaccacaacgatagagactgagagactgtgtaagaggactgcatagacgaccacacccatttttgttcctgctgatttatcaggtcagaatctactattattagagatcctaaattttcttaaaaataccatttaagttcatattttatttcttctcctgattaaattatactgtatatgaacagaataaagacatgtgcattggactactttaagaatatactaaagacatgttaaacttgctgaatgttagaagaaattcaaggcatgcatattctgagaatcaatttctagaactggacaggatcttagatgccatttaccacaacttcttcattaaatatatgaggaaacaggcttagaagcctgttaatttcccaagactatccacactactagcatttccactatatttatggtctgtggtggtctgaataggcatggcccccaaaggctcatgtttttgaatgcttggcccatagggagtggcactattaggagttgtggccttgtgggaagaagtcacatggtggcgggctttgaggtctcatatatgctcaagccatgcccagtagactggacagattgcttccggttgcctgcagatcaatatgtagaactctcagcttcttctgcagtaccatgtctgtctgcatgctgccttgctgtgatgataatggactactcttctcacactgtaagccagctccaattcaaggttttcctttataagagttggtgtagattacatcatagtgtttattacagcaatagatacccaaactaagacatggttcaacattgacagaaaacataaaaaactccttgaatacattttagtctgtggaattacttaagggtttaattcatctcccattcttcactaatactggaaattgggtatattaaaaagattaagccagacatagtagtgcaatcctttaatcccagcactagggagacagaagcaggaggatctcttagtttgaggccagtctgatctacatagtgagttcaggacagcaagggctacatggagaaaccttgcactgaaaaacaaaaagaaatctaacaacacaaacaaacaacatacattcacatcggcactgacaatccacatacaaatctgagctatttttaaagattgcttggctattatacaaaaattcaatctgttagtttaatacacatatttagtaagcatacatacacacatatagctgtttatatagtaatatacatatagttagtttaatatatgcaacctggcaaatatcctcatattgtagttcaatgcatgtatgttaaaaatgcttttcattctgctgttctacagtataacttaaccaccacaagtataaaaaaatgatccccataacgattaccttgtccgaagagccagccaggcagcttcaacatctgcatacaggttcttctctgttggctttccagaactagcaccgtatccagagtaatcatatgagaatatattacaattaatccgggaccccagacctatgtaaaagctgctcatctgaccaagatcaacagcattgccatgtgagaagagtaaggtatatttagcattgggtgaacaacgcacaaacatacaagcaattctattgcctttactggttcttgtcatgaaacactcaatagcatctttttctctggaagagtattgccagtccgctctttctgacaggtgtaaagtccagcggcttccactttcatcacacatcagtgtgtaagttggatcaggtggcaaaaatgctaattttgaagcaattttcccagggcaaggtggacagcagaagaggcaacatagctcgctaaatgaaagattattcatcttctgaaaaagaaaaagagacaacaaaattttaaaacttaacgtggactctgcactctcatacaacaggctaaaacaaagatacaaataagtatcattggtactctatgtctattaactataatcaagaatcctcccaaatagatttgctgacattgttctagaagtactttaaatcctggagtgagacaaacatccctggaaatagacagacttaaatactgtatatttctaaaagcagtgattatccacttaacaaaaacatttaagtttatctataaacaagatagaaggtgtgtttaggttagttggtaatttctgtgtaacttcacaaaaacccttaatcccacaggagggtaaataaataagagcatttggagatactattggttagcaatgtgtgttatgtgtatgtatttatttatatcttgatactcaaaacaaccttgttcaacagtttgagttaagaaatttgtacaagtgagccagggtaagacactagtcccagctacattcactcaaaaaaagggttttgagctcttgaaacagtttaaccaaatgacataatgccttcatattacaaacctatcattttagtttataatttgtggctcatataaaattcaacagacttgcctggcgttggttgcacacgcctttattcccagcacttgggaggcagaggtagatgcatctctgtgagttcaagccagcctgatctacaaagctacacaaagaaatcgtgtctcaaaaaatccaaaaacaaaacaaaaaaacaagggaattaaaatcataatgacaaataagcacagagagaaaagaagaaagcattaatgtagatactactaaaatagagaacagaacaacagagagccaaagctgattcttaaacacctctctccacagatattaacccatttaagcattttcagaggcacttggacatagagactatgagccactttgcaattgaggcatggaacacatatacaacctgcctacggtcacacagggtaaattctggaagtgataagtaacagaatgactttggagtcttttttttataaccaaacaacactgatgaggaggagagaagcaaataaataaatgttatagtctgaggatcatgtgtcaaagactggttacccagagtggtatgactgtaaagtgtttagggttgtgatctcaaagaggactatgggatcccttctttctcttttgctggtgcaatgaggtgagtaggtctactgtcatatgctcttaacatgatatacttactaccttgctatatgtttaaagaaatagggtgaactgatcatgagcagaatccttcaaaacaaagcaacttttctacccccaagatagggtttctctgtgtagcactgatgtcctggaattctctttgtagaccaggctggcctcaaactcttttcatcctagtcagaatggatataatcaagaaaacaagtgacagcggatgttggttaggaggcagggaaagggaaatgtttatacacaaaatataaactggtctagtccctatggaaatccttgtggaggtttttctacaaagttaaatacaactacagtaaaaatcaatttatacctattcaaaggactcaaatcctctttgcacatccatgaccattgccactatttacactaactaggaaatggaactagcctacaagtccatcagtaaatgaattggtaatgaaaatgtggtacaaatacacaatggaaatctaattatatctaaagaaaaatgaaattataaaagtttcagaaatttggaatataaatggaggacatcatattaagggaagcaaccaaggactagtgagacaaatgtcatacattctctcacgtggttcctagttttgaagtttttatttatgtgtagtggccaagaagctagaaagggcctattatggggaagatgaagccttaacaggtgagaggacagaatgcacgtgctagccaagtagagggggattgatattaggggttaaaagtttaagcaggggtggtggtgaagggacagggggacagggtggaggaaaggttaaccaaaactaaagatgcataaaatcgtattctggaaacctactctcttataagctaattaaaaattataattgaaaaaatatatatataattgaagtgaatttggacacagaaaccctgcatagctagacaatgctccctccaggaaacatggttattgaatgaaaatccagtgccaggcaggggatgccttcatatgagttactagtcactgaggccccagaacccccgaaaataacactgctctatgctgtccaccataactaagttgtaatacttgattgctgaagacacaacatactttgttgtaggacacagaaatcaagtacaactggccggaaaacttctggcttctactcataaattagtgctgctctggtttttggccagaagttcttttctgcagttaatgcacagattcataatggtcaaagtgctactaggtgaaggttgagtaatgcgtgaacaaaaaataaggaactaagaactgcttatgccattaacataaacttatacatacaggtctgtccttaagatacagctaaaaaagaaagaaaatgagcaagccacgagggacaaggcagtaaatagcactcttctatcagttcctgcctccaggctccagccctgccctccttggatgacggactaagttgtaagatgaaataaaccttgtccttcctaagtttctaatagttgggatgttttatacagcaatagaaacctcaactaaggacaatctatttaaccttgaggtgatcttgtcaagactacaatttcctcctcccttgcagactgtcctgtcttctgtaatgcacctcagcctccatccttacttctcttcctataggcatacattctgttataacatctttaggtatcttaagacagatctaaattcaaagccaatctagtctacaaagttccaggacagacagagttgcatagtgagacccccatctcaaataaaaataaaatatagtctaacaatgcagcccaggttaggctgtctttgtgcatgctatgcctgcctgcctgccattttgatgcttactattctaatcaggtgcacgaggagtaagtgctctaacaccaagctaatctccagaacacacggacaccttggttacaaaaatttatgcctggggttggggagttggctcagtaaagtacttgccatgaccttaattccttcttgagccagaagtcatgtaaaaacgggattgtggttggtgcctcgggagaaggagagaggaggatccctgcctgggtttgcccaccagacctgcaagggccaaatctgaaaccctggaggggaaaaagagggagagaggaagaaagcaggagaaggagggaggaagagggagaaggagagagaggcagggaggaagggtgggagggagggagagagaggagagagaggagagagagagagagagagagagagagagagagagagagagagagagagagagagagaacttcagaggaatgcatgtgaagttgacccctggcatccagatgagcatgtacccacttgttcaatacacctcctgtcatacccacaaaaatactaaagcttgataatttgaaagtgcagatgaagacacaagaaaaaaaaaaaagttatttttgaatctacctaatctagtactggataaacagaatggatgtttgttaacaagaggccaacagtggagtaaacaaagtgacagcaatttatcatgtggtgctgggaaccaaacgtgggtcctctgaaaacagcaacaagtgctcttaactgctgagccacttctccatcctttcaccgtatcttttgagccagggtttctcactgcatagaccagtgagatccaagaatctagctccatctttcacagtgctagaaacattgtaaaggtgctagcaactgaacacaggttttcatgcttgcgggacaagtactttactgacggattatctcaccagcctacaagaacattaatttatatttgacaacttaatgagttataactttagatagtggggatgaggtaggtaatgagctacagagaacacagaggtgtcactggtagggtaacagagcctctcatttcccacagctgctttccaaaagactgtgttgatacccaggaactggacccaccatgtgggtggaaactaaatccaggtccctatgtgtgaacatggagtgcaagcatgatgggttttgtggaaaattaaaattaaagatgaaagacccacaccccccccccactcttctggaattctggactataaaaatgatggtttgagtgtgtgaaaggaagggcggcattggcaacacgagcaaatcctggacttggtgtttacatttcccagctctgttgctcttctgtctcgaagattctgaggtatgacttttttaaagaggaaggcagtcttcaaatgtgtgagatcctaggaagtctttgaacacacattcaatactgttaaatttgttttgcaaaatgtacctgaaatagagcaagggcaagggttgctgctcagtggcagagtacttgcttaacacttgcaaggtctaagaaccaggaagaaaaaatattgtcatcaatttgtaaagatacatgcatgagcaccccagggatgtgtattatttagattaattttgatggtttaatgaaaacaagtaagactcttggaatactaatgaatggtactgaacctagaaagcaattggggagtagtaatgaaaatcttggagtactttgtattccagaacaagtttttactttaccttagttctcaaatctgtttattagctgatacttatctactcactacattttcttacttcaccagaggttctgatctcaagcactgccaaacaagctcctggtttgaaatgtaaaacagtgacatagccttttctttccctttgtagtccaggttggttgccacctggcaaatgtggggtttgcaagcatgtacaatatctaacggacaataatcttttcaaggacaattttcccatagaatttaaaaagatatcctttataaattaaagaagcttacatgctggagagatggctcagaggttgagagcaccatatatttttccaggggagctgggttaaatttccaggagataggacacccttttctggcttccaccaaaaccaagcacacatgtggtacataaatatacaagcagacaaaacatgcattcacataaaacgaaataaataaattttaaaaaagaaggaaattaagagtttctttcctttcttagtttccaatgagttttagttgggtaaatgacagaaaaccaattttctatttttgaaatagttttgataatatatatatgatatttacacatcaatagacttgctttgttaatatttgcctcagactttgtacttatatacatggttgagagtgacctaaagtgtgcctgaagtgtgtccttacctctctcattatacttttgtattaagattgtattaaactaatacaacttagttggggagttcctacactaaaatcagtttcttgtgatcaataatttgattattgattattattttgattatcgattatcctattccctacagcttaggggccatgtcttgctgttttcactcttttgaagttttttaactctcgtagtaaccatgtgatgacatagtggggagggtgaggcaaaaggattccaagttgagactaggttgagctatgtaagtacatcctatcttttgtttttgtttttcgttttttgtttgtttttcgagacagggtttctctgtgtagctttggagcctatcctggcactcactctgtagaccaggctggcctcgaactcacagagatctgcctgcctctgcctccacaataaaatcctgctgtcaccattgtaatggcagagaatgaagtcagagaaatggccaatcacaaaacaaagctgctcaagagacacaaagtactgagtattaattgcacaatgttggatatgcactgaatttttgaaatttaacattcactttcaacttccaggacaaatgtagatccgcaagccttgaataataatgtatagaatggaaacctactgaccttgcaaagctggcctgagcactaagtgaggtctaacaaatatctgaaatttatactaaactgctgcagtaaggagtgttaactgacgttctatcagccaaatgacttgtttttatggaagcttgtaagactgtctgcacatgtttaggagattatgaggactgagtgacagtagcaacaggaaccaactttgaagctgacgaagcttctagcccttgagcctgtctccttctcacagccttatctcaggactctccattttacttttttggaaccctcttgctctagtttaatattcctggattctgctcagttgctttctgtgagtctgtcttctaccaagacaccaccttcagtttggggcttgaaattgtaaatcaacatcagatctacgctcaaagcacacagaccatctactctgccctgactttacacctagacaacagagtaacagacgacactagactgagacccagacaaactggctacttgctgttatgtacactagttagatgaaagattagttaccaggctaaaaatctctgggtccaccaggggacctgtgtgctttgtagctaaaaatggtactttcttttttaatgattaatgttacactttatatcaggaaaataacttcttttaagacattgtaagccatgggcaggcttactctggagcactgggaagttttacagaagtagagctgatgcaagaggcacactcagagtgagagtgaaacatcactgtcaaaagctaccattaacaagagtaagtagataaccacatacatgttacacaggaaatccagcctggaggtgtgggagaggcttgaggcgcagcatatatttatgttcctccctttattatcttttggtgaatgcagggctctctgggtagacatcaatcccatgattacacactactgcttacaagttttagcctttttatgcccacaacttaagcagtatacttacgggtttcacaggctgccatcagggaggtattcttagatctggacttactcttaaaaggctgatagactcacatgcctaaggctcatgtcccatccaaacgagttcagtctttcaggactgagctatcattcattgaatcttattctcaagtcttctgccttttataaaaacaagcatggagaacctccactccactgatcttccttccttccttccttccttccttccttccttccttccttccttccttccttcctttccttcctgtttgccaacagccatgccatacccgggagataagtgtttcataatggtccctagccgtggaagaagttataagatgtcccacttaaggccgagcattcaacagtcacttattttcatcacttcgactactatgagtttgtgtagttactgctgatcattacaaaaagaaaaccctcataccaggcatagtggtgtatacctttaaacccagcacttgggaggcagatctctgtgagactgagaccacttaatgagttccaggacagccagtcctacatagtgagacccagttttgaaaaaacaaaacaaaaccaaaaaaccaaaaacaagccccactccccccaaaaccaaccaaccaaaaaaaagaaaaaaaaaaaaaagaaagaaagaaagaaaaaaaagctggcagttccactaactaatctatgggcacaaatataaattatgaaaggttcaggctttaatgctgatcggctctacctccttaagagacagaccccgccccctgacaacagtcagggcaagcacaggaaaatgtgctacgtcatcaccacgtcacccgccacacattatgtcctgtgtgaggactctgggcatgcgtggaacctcagtgtgcatatgaagtcttccctttaaaagtcccaacttccctgtttcaccctctctctgtttcttctttgctgtctcttctcccacctacgtgctttctctgcctctatggcaaccggccatggcagtcagccattaactctgtctcccttctctcttagtctctctactctgctgggcccaataataaactggttagtatgtctcatcttggggcttcctctttttctttatatctaatttaaacaaaaacataacaatttagataggtacaacatgttaaattagaaaaacacaagtagtagctagccctgtagggccacctatgacctctccagccacaagctttacagtaccacacagaaatctgcgatggagaccacctcaaatcaaattagaaagaatttggttaccccctttgcagacttgtcaccaatgcaccagtaggcacattttgtctagatagaactggttctgtatttaaatatggtattacttcaagattaaagtagagcaataacatgcagactcatgtaatgttaaatgtaaatgttctgaaaagtgttttagccagagctgacagagaccaacaaagtgttctaaactgttggccaagtatggcaacaagggaagggtgaggtgatttgaatgagatgactcctttgtcttggggatttaaatgtttggttctcattgatagcacaatttggggaggtttagcaggtgtagccttgtcaaaagaagtgtgctactgtaggtaggctttgagagcttaaagacttgagccattttgagtttgctctttctgctttgtgcttgtggttcaagatatgagccttcagcttcctgctactatgccttcactccactatcacaggctctaacctactggaacctgtcagctcaagtaaatcttctgttaagttgtgttagttatgtgttttatcccagcaatgaggaaaaaaaaattaatgcagaagttggtaccagggagtggttactgctgtgacagacttttgaactttggacaagaaaagtggttaaatgctgcaagagtctaatgggtcaccatagtaggagctcagaagaaagtggtgctaagagttacacagactgtggagggccagctcaagaggttttctttttctgtttttttaagattttatttatttattacgtacacaacattctgtttccatgtatatctgcccaccagaagagggcaccagctctcataacggacggttgtgagccaccatgtggttgctgggaattgaatcttaacttctgagccatctctccaggcctcaagaggttttctaagggatgaatactggcaattggactagagacattctgtgatagtttggtaaaattctgcccatgttctaaaaacttgcctggggctattatagactagtatctcagtgaaatttcaagacagcataatattgactagttgcatggttattttgaagaagaaacaaacattgacaatcttaatgttacaggcaagtcatgtgctaaaagagaggctgtagctgtaattgatggctctcctacagccatcaaggaaagatttgacttgcactggtattatcttttccactcttttgtaacagttcctggttttgacaaaaacagtaatagataaaagaaggaacatctctctctctctctctctctctctctatatatatatatatatatatatatatacatatatgtatacatatacatatatgtatatgtatacatatatatatatatatatatatatatatatatatattcaaatgaaaaccttttggaaagcaaatgtgaatttcttctacttacaagtcctctgaatctgaacctataccttgtttctagacagcttaaaagtaatgaactctatattttaaaaacaccttaagtgggacctttatggatctttgagtttgaggccagcctagtctacagagtgaattctaggacagccagggctacaaagagaaaccctgtctcaaaaacaaaacaaaaaaccccaccttgatagcttccctctacacttctaataaaactgaacactctacaggtcctcaaatggctcagctcacctctcaacacatcttgatactttcaattcactgctgtagtttatagggttcacatatgctttcatagctgaacattgtgattcccgacacacattcactcatggggttcattaatgtctgtatatttataattggtttttttaattatgtgtttgcgtattggtatgtgtacatgagtgcagatgctcacagaggccagaggcatcaaaaccccctggacatggacttacaggcagggatgaggtacctgatactgggtgctcagaactaaactctggtcccctccaagggcattatatgctcttaatggctgagtcatctctctagcctgttgtctattgtctttgagtgtgtttattccatgaagtcagtcaccatattacaaagactatacatagtataagttgagataatgccaagtaggttttcaggaaggaggttattttgttgttctgattcagagttctaagcactaatatatacatatttgtggcttaaatcttttctgcaaactggtaccactgtgctttgtttttatctacattgcattctgtctgtgtattacagaaacccactttctgaatgcttaaaatccagaggacaatcaagtgaacagaccactgaggtgagaattactattaggataatgtattacattgttaaacagagacatatattatctgattaagtccattaactacagcatataaataccaattctatactaattcatcaatttttgtcgtaacactacttactatatatgttatccataaaactatactgagtgttccctcataaggctgtaaagtccttaaaaagtttcatttgaggggctggagatgtggcttaatagttaagagcttggattgcccttgcagaagccctgagttgagttttcagcactcaggtccagtggctcccaactgcttttaactccagttagtctctgacttccatggggacctgtatgcactcacagataccagcatataaaagcacaatttaaaatacaataaaacttatcaaaaaagtgtcatggggataagggtctggagagatggctccacggtttaaaagcacataatgcacttataagaggacctgagttctagtcagtggattcatactgggaagttcataattgcctgtaacttctgctccagggagaattggtattgtctgtccttcatgggcacctgacactcacatgcacatatccccttcacatttacatacagtttataaaaataaatctttacacaaacaatgtgctatgggagggtggtggcaacaagatggctcggtgggtaaagggtttgctgcacaagcttgatgaacagagttcaatgcctgggactcatctaaaggtggaaggagagaatcatctccacaaagttctcgtctgatttcaagaagcatgctatggcacctctttccccaacattgtatgtatacacacacacataaaaaaaaaataatagaaaaatgccatttggatgggggggtcaagtgttctaagtgtggtgttcaaagcctgtttttagcattcggtaaacagaaacatgtggatcttgaatttcaggtcatcttgggctatataagaaggtcccagacaaattctcttctttctaagagaggacatgcttccagctggtctgtttgtgtgtgtgttggtgtgtgtgtgtgtggggggcatttgttagcttggtctttgaagagataatttaaagctttgagttggcaaaattacacattcctgtatgtttaagatgatgtagtaactttgaaatgtgctagcaggcaagattgagttccctgaagtattcatttttaaatggctgggggcacttgaaaaacccgagtaatttgttcatccagcactagggatagcacatcccttatttgatgcactattaactgatgccccaaacatcacaatagctataaatttaatgttggaagtgtcttccttggtcatttattcaaggtggtcagctttagctattggagacctcaactggaatagcctaatgaaaaaatgtctgttggcaagaatccaagttctcccccgaagatggaatcagaaggaacagttaagagttgtttttttcagttatttcagtttgttactattattattattatttttattattagtattattattttgcagtttaacaatgaacagaattaacaggagagtcgggtgtggtggcacacacctttaattccggcactcaggaggtttatctcttgagttcaggccaccctggtcttcacagttgagttccaggacagccagggccacccaccccctcataaataaataaaaacacagaaatacaagttttttatgaacacaatctaatcctctgtcataatggattttgttttgaagcagtaatatactatgcttttgcatagagagttgatgtttcagaattatttctaggttgtggaggtttgaagataatgctagtttgtgatagttttcatctttccttggcaaaacagaaacagttatagacaaattagatatgccaaaaaatttagtattaatatgatttatttacttatttggtcagagtcttgctaatgtagcccagatcttagctcatgatctttgacctaagccttttcagtgctggggttatgggcatgatcaccaatctttttagagccagtaaggtttcgaagtggggagtgtatcaattttaagccaacacgtttttattttaagaggtgccttctattctgaggttgtttttccacttttataatgttaaaccttattgatgggggctggagagatggctcagcggttaagagcaatggctgttcttccagaggaccctgctttaattcccagcaccaacatgacagctcacatctgtctataactccagttccagatgacccaacaacctcacacaggcatatatgcaggcaaaacaccaatgggcataaaataaataaatcttcaaaaaaatgttacttgagaagaccaaaacattttataaaaattaaacaatgccaataggtggtttttatttccttgaataaacagccttttcttttgtgcaattaaaaaacattttaaatgacactcaattatgtgtttgcacatttgtgtatttgtgtgaacatgcgaagtcccagaatgcaagtccagtgatcaggtttgacacactttttgcaaagaaagtggtcttgcagggtggtggtgatggcacacacctttaatcccagcactggggaggcagaggcaggtagatctctgagttcgaggccagtcagatagagaaaagaaagaaagaaagaaagaaagaaagaaaggagggagggagggagggggagggagggagggagggagggagggaggagggagggaggaagggagggagggagagagagagagaaactggtcctaatacatcaagttttataacctggggcctagcttctggaactacacacatatgcattcaaatcataccttagtgattgtgtgtgtatgaccttaggcaatcggcttcttagtgcctcagttttctcaactgtgaactacaactctgctgtgaagattaaagtctaaacattagaaattaatcaaaccatgactgcctttcacctgagaaaatttcactcataatggttactcggagatccccaatgatcagtcatacaatctgtatctgttgtcttcctcttctgtttataaacaaaggctttctgcatgcacacacccaatagagagacagactaccatatatgagttttttacagaatcagattccctacctctcaggcctaaaatgaattgtgatctagtatctcttctattaacctcttattatcaaggtacaatgagtttttattcaactttaatgtattagttttgagcatatagctatttttctttccttccttcttaaagctaattcaatcttagtttctgcagtcttcaagatcttatttttcagatagattggtcttttgtcttctgtttttttatttcactcaaactctcaattcccctccccacagaagctatactccaaccttgtactacccaaacaaggctagcttcaaccaattctgctagggttacaggaattagccatcatgcttagccaaggcatgatgctgccttggctctagcagccacttaacatactaagaataccaaaaatctatctaaatcttatgttttttaaatctttccattaaactttacactctaaatatttcagtctgtatttgcctccttgtactttttgccacattaaaccaaccaacccctctttcccttgtgtcttctatcaatcctctcagccatgccttaactattttccaccaagcattctaacatcactatgcaatttctaacacatacctgtctaattaatgctctgcatgcccaccaggtgatggtgctttcctgtttacatttttcaataggcctgtaggccctcatgaataagccgaaactctttaggatgccctataggagtacccttgcatcctggccgctactcttgtttctttactcatttattctcctgaacatactgaccttggaaaacagacatgctctgttttgtttctgtgcatttgcataatctattgataaaatattccctatcattcccctccaaatgaaaactccacccctctccccacatcaaagcttacagtttacttctttctcaagggaaaataaaaatctcccctgaactgtgctatgcccatgctgtttggctgagttacactcttcagagtttcactttgatttttctgtttccatgatatgaaacaaaatgttctatggttcctaagagataaaatgataaagctattaccctagcactttatactggaatgccctttatgaacaagaagtcctcactaatactaccttcttgctctaaacatttaagtaatgtctgacactctgaagtctcttcaaaagctctaagcaaaatgtaacctgtaactgggtgaacaaaatgtaaccaggtatctgagacaggaagactcaaggcaaacttgagataaacaggcagaaccccacccccactttaaagatatattgttattattcagacacaagctaccaaatcacacacatacacacagaaccccacccccactttaaagatatattgttattcagacacaagctaccaaatcacacacacacatacacactccagcctgtgtgtgtgggggtgttgtatctgtatactgtgtaagacactcatcagaaacaaaatctaggtcacaatctggggacagaattctttggaggttattacataaactgtgtcaaattatctcagttttcaaagcatacttaaggacaccctacactcctcatcagccaagcaagtttattgcaactgccttccatatttgttcctggaggcatatactttgttttgtcctagaggattgctcacaacaaaccaaggaggctgcttcaattctttaattctttatcctgatctacagtcaatacacaccacactcattttccctagtgctaagggattgtacctagggccctgtcaccactagtcaagacctctttcaatgagttaataacctcaaccctgttttttttaatccctaccatttcatgtcactaaacatcctcaaaatagaactccccaacaaagccataccaaaaagaattctttagccccagagacactatatttttaaggacaaaggcttgttattctatcacttctcaaatatgttgaggagctctatgagggaaaaattgaaaaaaaaaagtcataactagaataataatctcttgttttctaatgtttttccaaaggctaaatcttataatttatggcttacgaatttttactttaaagtgaattttagcaaatactgtagtgggggaaccctagaaaaatgatccaatgtgatccaaatttgcttagattttatgtcagtatatgattcagcagcctcatacttttaaagtgcagtgtgaaacatacctactgctttcatcacagggatgtatggtgattaatgagctaatgcctgcaatacagtatacagctctaattcaaagaaactgtataaacacaaaacactcaacaatctctaagaggttaacttccaaatacaaaaaggtttaaaggttgtctgtgattgtaagttgatcaaatattcgggactgtactgactggttcttcccatcaatatttcagaagggctgagataaactttatcaaaccataacgcagataattataagctgtgacatgtactatgaaaacaaagtacagagttccacatgagaataaagtgaggggtgggtctctctacttccctctcaaccttacttaacaatactttccctacacggctatactttatacaaggaaaccaagactgtaagttttaagttaacttttctaagctcacacaatttcaaggagcctggcacacaggcctattatcaagactactctgtcaactcttactggattctgctaataactgcatagctgatgccttcactgagggcacaactttgctcattctcccctgtttaatgaaacctactataactaccctatttaagtaggtcaaattgcttcctttgctctcctggactctctctactcattctgaaatatctatcacattctaacattctgagacatttcatttgttatacatattaacagtgatcatctgctagatgtgttctagaaataagttaggtacctttatttactttgccatgagcttccctccaccaccaaatcaacctacaatagtgaacggtgcatatgcagtggacacgcttccacttttcctctttagctgcccagaaaaacttgtctaaatggtttttttatttataattcccaaggaaacaaaacaggccctatatctgagccaacttacatttaaatattttaatttactgtgacattttactctgctaaagaagcagagactagaattatgattattaaaaaacctaactaaatgaaaaaagataaaaaaaattgtaaagctgagtatgaaatgagaaggattcagatactgataggcgacaaaagtgcctgccatgttctatgcatctagaagctgaatgtgagccacagctggaacataagatttgacgtacagcttgagcataccatgtaaaatgagtaggaccagaaatctattttgaaacatttttcttagatttttattagatgagcattcctaatctgaaagtcagacatcctaaaacactcaaaaaatctgaaacttttgaccattatgccagtactcaagaaagttgtgcatttcagagttcatattttcacattagagatgttcaatgtgtactctaaaggaatggttgcagattccaagaatctctctctccttctcttaaagaaatactgaatgacaatagttatcttcaagttttatttttcattttgtatgtgtgcatgctcaagcctgcatgcacatggtgcctgtggaaaccagaaaaggatgtcagatcccctgaagctgtagttacaagtagttgttagccacacaatgtgagtgtttggatccacctccagcccaagagttgctaaattttaattttgatacagggatactatctaaatacaatgaccatcattatatcaacaaagaacattaatattaaaaaactgaatttcaataaaaaggtagctactttcaaagaatacatatatattcataagccttttagtgcagaaaaaaattctcacagatttcagatcttaagacacttttctgtgataaagtactactggccaaagcagctaaaggagaaagttaattcaggcccacagttcaaggtgtcaagagcttaaagcagctgttacactgcattcattcataatcagaaagcagagcggtaaacacccacgggtgcttagttccctcagtatgttcatcttaacagcccaagaccctgcccagggagtggtcccacttgcaagtaggatgggtgctccactatcaacacaaccaagctgatcacctacaggcatgcccagaggcccatcttccaatgagttagattctgttaaactgacactaaccatcacaagagctaaatgtgaaaacaccgaagtatgataaatttgatattaaaataaaaaattctaaaccaggtgtggtgacaatcctagcacttggtgggctaacttgaagactgctatcagtgtgaggccagcccaggcttcagagtaagactctgtttcaatcattaaataaatgaaattattgaattaaaaattgttagtaaaatgatattcaaagtaaaagccaatctaaagagtggaagaagggccgggtgttagtggcacacatcctttggtcccagaactcaggaggcagaggcaggaaagtctctgtgagtttgaggccagaatggttttagagctagttctggaaaagctagggttgttacagagaaacccctgtctcaaaaaaccaagaaaaaaaagtggaagaaggtatttttaaaaccccaatctgttatgcagaaaataaagtaaaactaagcaaaaagaaaaatcatacaaaaagaatacatatgtccaacaaacaaatcaaactatcaccaataatacaaataactgggagatgtgaatgaaactggaatcaaagtaccattccatcctcctcagaatggcaaaaactagtaagtctagagtattaataaggtggaaaaaaacctatcaaatccattactggcacaaccactccagacaaaaaaatgtcaattacctactaaagagaagctcattaatctactactagatttatggaggagagtaatctttcttactgatggccttccctgtataatgaataaggaaggcaccactaaccctaagccagggcagaacatgtaattgggtggcttacagttcagaggctcagtccattatcatggtgggacatggtggcgtgcaggcagacatggagttggagaaagagctgagagatttacatcttgatatgcaggaagtgaaccgagattctgggcatggcttaagcattcatatgagacctcaaagcaggcctccacagtgacacccttcctccaaggccacagctactccaacaaagccatacctcccaatagtgctgttacctatgagcttatgggggtcaattactttcaaactaccacactctccttaaagttcgggcaaaactaaatacagtcttcccttttcacacaatataacattaatgtcatcatctgtgctaaaacaatacaactaaacattgagtacattttcagaaatatatgacattggagttggttttgtttttcctccctcttctctcagtgattgttcagtagagccgttaaaactcatgggacttggattcattggagtggtgtagagtcagggactcattgtgtatcctctgctggctttgaactacttgatctgctcactaagtctagctctacagcattatctccatacaagttggccatagaacatttgttatgatatcgttcggtgaaaatggaacagaaatatttggaaaaatatggatgagtcttggccaaattgagaaaacaagaaagatataaacattgtgcttaaataaacttagggtcatcaaaattaaatatatttatgtatatgtgtgtatgttcagggatctagatggtgttcatatgaacaccgacagaaggaggcattacaatttaaggttaatggttggcctgggagaaaaatattacttgtgatatttaaaaggtataaggaaagtatccttttgatttgcagttgtgtttcctcattacatcttatgtcaccacactgatactgctatattgtgactttacagagactaaagacatggtatgggtatagacttgtatgaaagactgcttcaacaccaaggactgaagataagtcaaaagatttgggttcaagtctcagttctcactaactttaggcaatttaaatgattaatttcttcagtctttacttaatctgtaaaagtttacaaggctgggacagacaaggcaatgtatatgagagactcctaacggtaagaaaaggagacatttttttttgagaattacaggaaaaatcgaagttagtatagaagcaaaatctaccagtaaataaatcaacaaagttaataaaccctacagttcattgttaacacttgttagaacaccaacacaaacacacaaaagttcaagtttgccaattagtactcttaaaaactgagcaggtggaacatctttaaatttaaaagaaatttaaattttgttatgtgtatcaatgtttttgtctgcatgcacgcatatgcatgtataggccccatgtccacggagatcagaagagggtgacagattccctggaactggagttagcaatggttatgagccaccatgtgggtcctgggaagggaacacgggccctctgcaagagcagcaagtgctcctccttagcaggtggcacattttattagttttagattactgatgtagaaactgattcagactagaacagcctgcctggagttgtagaccaatttggtgacagaatagaacaccaattgcttcattctactgggtttattatcttgtcctagtacgtcatggtgactgtatgtgttgggggtggggggagaccctgctttttcagttgtcatttcattcacatacaaaatgggtgatggcacccagggaaaccagccacatatcaatcagggtattgtacaccaggggacaaatttaaagctgcctagcttgctgaaaatctaatcctatccttgccaattaaccttattaataccggagtaggagaaaagagaggtcaaaatatgggtgtgattgctacctctttcctcctagatcttaaggagtaagagcagacagagatttttatccattttcaacttccaaaacgacctcaccgttttcctttcaccatgccccttctcccaaaataaaattcagtaacaagcatggacgccgacagtaacggtgatgttcaaaatactgcactggctacaagtaggtatttcacccaattgaattcatgcgacaaacgtatggacacaaatgctcgacaaaataagtgttcgtttacagaaaattcccgtcaatataagcaaatgaatgccatcacaaaccgcacttgatgttctactaaagacttagtagtttccaatgttgccccaagatatccaaaattcttttaatacaccgaaggcttgaaaaatgtaaatgaatcatcttaggaatcaagcactacggactgcactaggaatacctttcataaactaggcaaaatttaaaggtcaccctttccgcgccccgttattctaatcttttctcaccaaatctgcttcattgtcttaaatcagagtaccactggaattaaatgttctgcctttgacagaaagctcatctcgattaatgttctgaaccttaaaaaaaaaaaaacaaaaaaaaaacaacaagaagccgaggttaaactctccgaacatctaccacacaactttttttttttggtccggtattaaatacaatttcaaacaggactctccaacttctaattcaaacccaacctcctagagttctcaatcaaagatgatacaagttcaagccatcgaaagcagcgcccgcgacaggcggagcgggataacccgctcaagctcccggaggactccatctagtaagatcgaggttggctggacccggacatcgatccgagagcgagggcccacgagtggcccagatccagggaggggagcggcgcccgatcccatcttgcggtcctccctgcgggagaggaggcccgggacgcgccggtctccgctcggcagccccactccggagcctctcggcctgtcccccggcgcggagcggcgacccctcggtggcccagcagcccggccccacgcacctgcagctgggcggccgcggccgccgacgcggtgtcctccgcggggcgccgcccgccgactctgcgcgcgcggccccggcccggcccgcccggcccggcgaggacgcgaacgagcgctgcggtggccgggcgcgcttcgtgtggccccctccacgcgcgttcgcgttctgctgactaacggccccggcgcgaggggcggtcgccgccggggctctccggcctgaggtcccgcgcggccgtggtcgccgtcctcaccgcagggccggcgttggcttgtccgcagcccgccttcttcggcgcctctgaagcccgccaggcggcggagcgcgcggccgcggcgggagggagctgggagggaagccggggggagggcgggaggggcgagcggcgcgcggcccggccggagctggtcacggactggaggaggagggagccgaagctgacccgggctcccggctgcaggcgggcagcctcccggcctcgcccaccctccaccaatcacaagccgcgcagcagagtcgctacgctaccgagccgcggacaggctgggagcgttcggcaggaggcggggattgcggaaaaggagagccaataggaacggaggatccccgcccctccgccgtgatggacagccgcattctggccaatgggggaattctagattcgaagaatgccggacttgctcggtgggtctggggaaggctttccgcgacgggggtggtcgaggatgcctagcgccgagggcggagcgtgacctacgcgatgagtcacgtgggccgacggtgggggggagggtatgggaaggaaagagtagaagaacttcttccgggtcactgtcaataggctcaacctggggcgggaacttctttgctcttccctgaaacacacgggctgcaccgacttgaggtgcttgtgatttggtgatgagttcccagaaaggcaacgtggctcggtccaggcctcagaagcaccagaatacgttcaccttcaaaaatgacaagttcgataagagtgttcagaccaaggtaggctcctgcctgttgtactgaatgcgagtccaggaaaaagtgattggaaggggagagaggaaatgagagcagttggcgagggcgagcgtggcttgcagcccagttagtcttggctgtgatgcaatcctgtgtaaaatattcttcccacgccctttccttcacttggctgtgttccgtgaatacatcctatggtcagccaagattggacagggcagccttcatccaacctaaggtaccggtgggcaattgagtccttggatgtgcccatctggatcacgaccctgcagcaggaaactgaagattaccacgcgaatgtctctttacagttcttctctttgcctgtgcagctactgtttttcgaaaactccaagcccatacgtaggtttgtagggcgtacgatcttagcatcactctgctgttgtaagagcaaacgtttggcttgtgtaaaaacggttcttgctgtttatacagttgttttatctagcgtgacgtgtaaattggaagaattttttttctgtgcatagatatccccttccccataactgtatggagaacggataatcggttggaggccatctttacatcagataaagttaatatttacatgaacaagagttcaaatttcctaagcttgtttcttgaagtaatttaataatttctgtgagctttagcctcaaatgagaaatctggtaggattattttgaaactaacaaaataaaagagtgaatagtctgggacatagtgggtgatgaattttaaaacattaagaaagcaacctgtttatagtaacttgtactctttttgtctttctttgattctcatatgtttagtaagtggctttcgtgtatggcttaccctgggggggggggcagtgctcagaaacattgactctacttatggagcctgtagttctttgagtgttatggacagtagttaagcaaatcggtctgtaattacaaatttcaatagaacttgctaacgggaaaggcagttcatcgaagaagagtaaaaaggatatttcaagttaggcccccggagcacacattaggttagcaggccctgggtctataaacctgccacctgctttattttagaagaaattatagagtagaagttggtaaagaaaaatggatcagtccacaatttgccccaaacagtgctgggagtagtggagtgtaatttcctcccactgtccctgtagctatctcaaaatctgtagagagcctcaaaaggaagactagaccagacttgaatagaattgggagatacgctaattagtccttcccctgagaggaaggaaggtgggacatcaggttgtctcagttctctattgtaaagacagtttttaaattcaagactggtcagatgaaagtgaaccttccccctactcctacactgcctctactggtcttgaacttgcagtgatcctcctgcctcagtctcctgaggtgtctaccaccattcatagccatgctagatgctttattaggatgtttatttagataagtgtctactcctgtatttgaatatattctagaagaggaaagaagcttgctctagtctttcaaatggccaataggtcattttctgagcttatttgaaagaggcccattttaatggtcactgatcatcaatgccatctggccacttacaggtttggaaaaggtggagatcaaaagaagctcaaattttattcaattgatggcattgttgattctgactagatagctttgcttcctttactggagaggagatggtgtgtaataacactggtattgtggaacatggtcttctgggagtgacatggccagtgacctcttgaaccctgggtacctgtgattacctgtgagacatttgcacagggttgggcccattagtggtctgtcatggagtagggagggacttatgaggcatcacctgtccctgagtgtatataagctatccacggttggttgattgatgctgagagacattttctttgtggggtagcctacaccatttgtctttgctcctgtaaaaagcccatgtttttgtgagaccataattaaaattaaaattaaactcactgattcactgagctcaacctaggtggaattgtttctttggtctgttcttgtcccgtagtttcttcatctccccagaagttcatgctgctggcgtagcagaagagagacttcacaccggttctgtcattttttactctatgatactgtgttagcattatgtctgctcttaactttctgtcaagatggttgtgcagatcatgatggctttcctagagggcgctgtgatggatgagaaggtgtgaggaaatggatgagtggagagagttctagagaccattacagggcacaaagggctgttcagattttttcttttaattaagagaatagagtgaatggaactcttgagcatagctgtgccaattagacacgtgtctttctgaaatggtattaggaagtgattgtgaagaattgctaataccactgggcattgttggcatacacctttcatccctgtactcggctgtaataagcagaggcagtcagatctttgtgagttggttgccagtctgatctacataatgagttccaggacagccaggggtatgtaaagagaccctgtctcaaaaaaccaaaagagagagaggtggcgggtaagggggtaggggtgggggggggagggatggatgagccaagcataattatgtgataatctgtgtagattcgaagttgctcaaaacctaagaaaattaactagaaaagaagtgtatacttttgaaaagcattgtaacaagtttatagatcataatgattacttttctggggtcaggtgtagtcatcgttaacagttatatgtatgcttgcagacatctatgtgtgatatagcatgcatgtaataaaatacaattcccttttaaaaaaatgttctttcaggatagtgtgtgtcctagcctagacctcactgttatctaggcagttctgcctcagtttcccagttgctgggattacagacttggaccaccatactcagctaagttgatgggttttaatcattataaaacattgtataatacaaatatagagtgacttatttaaccagtttcctattaataaacattgagttcttcacagttatttactgtaaataaaaaacaaaaccaaaaccctgaagtaggagttgtggtacatgcctattatcccagcactctggaggctgaggcaagaggactgcaagtttaaggccagcctgaactacataatgtgaggccacacttagtgtcttgtaccaaacattgtggtgtgtgtgtgtgtgtgtgtgtgtgtgtgtgtgtgtgtgtactcactttaaaatttgctgtgagaagtgacagaaattaatcaaatagcctttcaaatttgtcagcacctgtgactataatatctatgaaagaaaagtttgaagaggcccaagagtacttaactgagacccttgagtttggagagtaaaggaaggctccaatgaaatctgatgggtgggtaattagaactaaatgaaatgggaagagcatgtgccattctctagaaactgctgttcattttatatgtgcaatctgcatttttgttgcatttcccaaagtggtatttttagatcttcattgcattttatggtcaagttgctttggaaatactgtgcgctggatttgactttgcagtgagggtaaagggtaaatttctctagcactgagatgagcacttctggcctcagtgaggcagggggattgccatgaattctaagctaggctggactatgtaccaaaccatccagagatgtatattaatatgctgtgaaagaaaagaaaagaagtccaaaaaacactgggatgttttgcaactcaaaaagataattatttaatcaaaatttccttggaactgtttggtttataaaatgtccagtgaactgatttattatggaacacactcacttttggaaactgattgccatcttgatatggagatgaaaaatggaagtctgtgtaattttggaaatatacttgtactaataatggctgatagttatatacttcagtgtgttatgtgttatgccatcttggtacacattatctaatcttcagaaggaccctggcttaaatgctataattatttcattttacaaactgggaaattagggcttaggggagtgaatggtgtcccctaaattacataattagcatgtggctatccattaattagagagctgtatgatgagactcgggacaagtcatttcaaagttcctttttgaatgtggagcttctccctcagtactggggattcttatcgcctcagctctggttttttaaaattgtgagacagagtcttgcagatatgtccatcgatagagaaaccatgaactttggctccttctgcctcagcctgctatgtaacctgaataaccaccagaaccagcttttcttttatgttttcatctgtactagaagcagtgcgaccctgagattaccatcagagtctaggtgtatgcgccctatcgttatggcctatttcggctaaggtgtgttttgttccacagaggtccacatgcaggagcctcagtccttcactgtgagggtgagatatggtggggatttgaaaagatggggcctggtggaatttgatggggccaccaggcagatgctgtgcctaggtgaaactagtattcatttctgagagtgagttctctgtgtgcttcactttgacctctgctgtaatcagaaggccctgagcttgtgtgtgacttgtttgctgactgtgcagaaatcactgggaaatcatcacgttttggttgatttggtacacatcctaaccatatatggtcctctgacctgagggtgccctgccatagcccttcctctttgccttccagaatatatagttcagtatcaatcagtggagacttcgctgaaataagtattcttaaatttcttgccctactcgacttcatggagcatggacctcacaagtgaagacatttttcttgccccacatcttcacctttctctcatttgctgcttcagtcagttcttcccccatctaaactctagttctagaaaaacacatgctgttggactagtgtccctccaggtgcactaacctcctccttaaagctattcaccagtgtctggcttactccatgtcacagttcctgtcatgcttagtaatgggtaatccttctagcatctgaccgttcagatcttagactccacccctcagaagtctactctggggttagcctctagcctttaccatggctgttaactgttctactcacaaacttttttttatttattttttttttattttattttttttaggcagggtctctttatgtcctggaactcattatgtactaggctagcccccaacccccaacagacataaattcagagatctgcctgcctctgactcccaaatgctgggattaaaggcgtaccctaacacacccagtttattcagaaacttaaaaaaaaaaagtgactaccatttatttacctgctgcctttttcttttcccgaaagcacacattttttgtttgtttgtttgtttgtttatcttgatggttgttgttatctgtcagtccttcacttttcactgtactttgtattctctttaccaatctgtgagtcaggatataactctgctctcttggccttctttctccctggggcactcccttgacagactcctaaaccttggtcaggatataactctgctcccttggccttctttctccctggggcactctcttgacagactcctaaaccttggtcaggatctaactctgctcctttggccttctttctccccagggcactcccttgacagactcctaaaccttggtgaggatataactgctcccttggccttctttctccctggggcactcccttgacagactccttaaccttgctcaggtccagcttcctatgttcccaccactaacaaactacccgtgtccgtccctacatattgtactttcttactgcaaagatgaaatgcctgtctctccctatactacttagacaacaaacaacaacaacaaaagggaatttaaggagaaaaggatttatttggcttccaggtccaagttcatcatttagagaagttagggcatgtacttaagcagaacttgaagcagaaaccataaaggaatgctgctttctggcttgctcccacacatgcttagctagctttcttctataacacaatactacttacttgcccagggattggtaccagtcatagtggactaggctctcctatatctattaccaatcaagtcaacccccaacagacatactcacaagccagtctaagctggataataattactcaattgacacttcctcctcaggtgacctaagttctgccaagtaacattccctaaggtcagccccttcttttataccatagctcaccctctcgcctgtctagtaacttgaaagcacaagactccttaatgacccatcccccctgaatagttccacccaataatagcttttctattattgatggattagtctagtttctttaaagatctccctgagaggctggcgatatggcacagtttctggagtgcctgcctagtacaaagtcctaggtttggtctccagcaccactaaacagtattgtggcatatacctgtcattctagcacttgggaggtaaaggcagaaggagctgaagtttaggcacatccttggctgtatagactagctggcaaaaactgcactttaccaggccattggtctttgtgaaattgttggttaaaaatagttattttggtgctggtgaaatggttcaatgggtgtttgctgcaaaaatctgatggcctgaattcaattcctgggatctatggtggaaggaaagaaccagctctttttggaatgagtgtgctcacattggcacactatcatatacacaataataataaatgtaaagcaagtctgagtgttccgtgtatgtcagcatagtttcatcaataataaagaaatgtaccactttgagggtgttggtaatggagtggatgtgctttgtgtgataaatcagagagagctctgtaactctcagttttgctgtgaacctgagactgtcctaacatctgaaggctatttacaaaaagttaacagtatacactcttcatgtttatcacccaggagtaactgccacttaaaatttaaaaaccattctctgtaccatctttgtgcgtctaactcctgggccccagcctccagctcagcctttctgttgagctgcaggattaagtgtctgatgacctgcttgacctctcctcttgagtgaagcatatggtaacaaagaaataactgtttttcttctaccgagggcctttacacaacagtgagtgttctctcccttcgttaatgcctccaccattgtgcagttcctaaaccaaaactataagaattgctttaactcaggcttgttctaatatcctgtttcagttgacaacaaaactgaactctttacttttcataattgccgacttaatactttttaatttatagcctaccttaggatataatagacacaaaaccaagggtggttgtgtgcatgtgcatgcagatgcttgttgtgaatacatatgtatggaatatcttcatctgccactttttacataattttaaaaatttatttaattttatgtgcattggtgtttcacctgcatgtatgtctgcgtaagggtgtcagatcttggaattacagacagttatgggtcaccatgtgggtgctgggaattgaacccagatcctttggaagagcagccagtattcttaaccaccgagccatcttcttcagcctgcattcatcattttttaaaagtgtttcttactgagcctaaagctcaccattttgattagacttgttgcccagcttcgggaatccctgtgctggctcacaggcatactctgcctcacctggctttttgcatgggtgccgagggtcagaattcacttccaaaatcctttgtgactgagccatctcccagaccagggtttttgttttgtcctcaataccaaggctaggacatgtgcacagatgtattcactaaatatcctatatttgactgtgtcaaatgctttgacaaagatagtaccattataattcaaacataaaaggggaaaaggaataactgataaattgtaatcctcagagagaaagtagatcttggagattagagggttaaggaattgagtagaattagagggaagaatctatgctgtattagttagttttgcattgttgtgacaaaatttcccaacagaaactattgaagggatgaaggattcactttgactcagtttcactgggatttcattacactgtggcaggaaaggaatgagcagaacagattggtttattcatgacagctggcgtgtgtggtggaggctcctcagtagaccaggaacatagagagtagccagaactagctgtggtggataggaatggcctccatggactgtgtttgaattcttggtcatagggagtggcactattaggaggtgtggccttgttggagtaagtatggtcttgttgaaggaagtgtgccattgggggtgggctttgaggtctcaaatgctcaagcccagcctagtgtgactatcttttcctgctgcttgtggatcaagatgtagaactctcagctacctccccagaatgatgtctgcttgcatgaaaccattgattataatggattaaacttctcaattgtaagccagccccaattaaatttttttcctttttaagagttgtggtggtcatggtgtctcttcacagtaatagaaaccctaaccaagacaccagggaagaatttaactttgaagatctcactcctaatgactgctttaccatatgtcatatctccacagccttcaaaaaaagtgctacgaacttgagaccaaacacagtttagcctgtggggacatttcagattcaaactgtaactggtgaatatgagttctgggtcaaagaattgaatgtatttcaggtatgcccagatcaggaagtcacatgtggccaaggaaatatatgaatgtgacccaacacaaaattgcaaacttacttaaaacagaattcattttttgtttgatttttgtgtgtgtgacttaattgtgtggtcccagagcatgaagtttataaatggcatcatgctgaaggttggagatgaaacaaattagaaggatcagctaagactattactccatgcaatgttttgaaaacaggatttccttattacctttggggaagagttcctgactcagaaatactcaaataaatgacaaatacacaaatgctatctattgcccactgatggagagtatgtgaaagtttttttttttttctttttcctagtaattccaaaacaagaatacaagcagatatttatgattactgccaaagtgaagacagtccattgtcttgtgacaaaagcaaaggaatgaagatctctgttgctttagtggctctccagggtgtatttgggtatatttactaagggtgtgataacgtgaccaaattgcttggcctctcgtggtcttgttgggctcatctgtactgtaagtgcttggtaggtttgtgaaaatgcccatctcaaacctgacctggtcttaagctttcataagtggtattccagtccttcgtcttaactaagagcttcccatgtccatttgctacttactcagttatgcttttcctggctcattgtgcttggaatagctctccttccctgtcacatgtattgccctcagcatgcatgtcttactagttactagtgcacctatcttggcttctttctcttccttacacatacacaaatgctatctattgcccactgacagagagtccagcattaaaaaaatagttcattgtatataatatatgctgtagaagcagtcctgtgaggtggcgtggaagaatgggatcatgagcttaatcatcattgtttactggtctatgtaaatccacttgtgtgtctagccactattgtgtgctaaacacctacaacaatgagtaggatgtatatcctccattctaatctcagtctagtaaccaaatttgaaagtagaaaaattatatgtgcaatgttttcacttaataagcttctaatgaagtataacttatatataggaaaaatatatagatcatgtggcagtttagtgaattttcacaaatgacatcatgtaactttctagaacccatttctcccagtcagcatcagcccactttctcgaatgtgtctattaaggaagtatgaacttttatttttatttatttatttatttatttatttatttatttattttgttttttcgagacagggtttctctgtgtagctttggagcctatcctggcactcgctctggagtccaggctggcctcgaactcacagagatctgcctgcctctgcctcccgagtgctgggattaaaggcgtgtgccaccaatgcccggctgtatgaactgtttttaatgaaccttgagtcataacttgggaagcatcagaaatagcattcagtggatgtggaacagcatcgtgatgcatcttcactgttcatgtgtacattagagcttcaaataatcctcctttgcccaaaaggaatgtgtgtggcttaattttccaacagtgacaattgtccctttttaaacctggactttcccataggaggtgaataaataattaaagtcccaactcttgtgatttacctgtatcttcaggatgtaaaatgacaattcaaaacactatggtagatagttctttaatatcaagtttattttagttggaatagttaggttcacactgtaaatttaatgttcagtattcaggttttttttttttttaacaaagttgatgtatttttatttttgtttggatggagttatttgctgttaataggaaaatctcttgtagatgatggagctctttgtgtattttaagtgatggttcatcattagtattctattatacctttatattactcaaacctcattttgaaggtcatttgctgttgtaggtcatttgcaacatcatgggtctgaaattccaagctaagctagggattactttaaatgctttgttattctgtgaagatttatatgttattaagtgctcagccctttcctaccaggtggctgacttgtttgtcttgaagttactcatgtcactgaagtcatcaatttgagtaatatgattgacatcatggtatatacttgtgtagtgaatgttcagtataccatcatgagcctttatcacacgattctgtagtaatattatctcaagtttcttactaactggatgacatgatggcactgatttcttttataaagttatgagagtcatatgggataagttagcatctgttatctgtttaaaagagaacattgtggttatttttatgtatggaatgcacggtcatttgatcctcatatggtcagctgttcctaggatgtttaaacagagtcatggcttactgtggtttctaactctaatttaaggtttccctaggggtgtgtttattaaggcttgctttttgctgtccagaaaaaaattattgatgtttctaattcaaaatggctgagtgaaaacacccccacctgaaatttcagtaaaatgacggaagaaaactatgatctcagacaattggaaaagatgcttctagcaaagaacgttatagagagcaccacaaggacaggaactgtcatgaagccagaggcagtgtgtcctctgactggtgagaactaaagaggaagccgaatgctggaaaactgagcatatgcttgactgagactcttcacagagatggtggcttttaacaaagcttacatcattaatagaaagagaacaagtgcttttatttagtttaaatgtagagacctttgtaatacacaataagcaaaaataaagtcctgtctttataataaaaaattaagaaaatttataaggcatagacagacaactcctaaacttataactttgtaatataatatatttggaagtcaagatttttctagtcaaatttcagaataatgcagagacaaagtcagaagaacagttgtctaatgtgggagaatgccacaacagaaatgtaagtccatgaagtgcctgtacctgaaagcagcgtgaagcctgtacaaagtaaagctaagctttgacctcccaatcaaaggcagggattataggaagtgaattcatttccagggcagtagtgatttcagatctgattcatctgtgcagcactacccaatagacctgtctgtagtatcgcaggttgacctttccagcaccatcctgtgtggtcaccatgtgtatcttctaagaacctgaactgttctcagtacagctgaggacttgaactttaacttcatttaaagtagttggtggctactgtattgcatagtgcagatctagacttgcatacatagactgggcagattactcatcagctctaagcattttaggaaaactccagctgggaattgcacaactgaggactttatctctcgtgcccaggtaaaggagctatgcagtactccacgaaagattttgatattgtcaatgactaaaaacttcttaaaacaaggacagacttctataaatcaggtgccttcatgttggttgcagcagctgtggtcagaactgaagaatgaccgaatttgtgatttgggggattacactgatagattgtttaaaacagcaaagtccaaagtaatgaaagtgagatgtgcaggacccagctaagcaaccagtttgtgtaaagaactaaccccagaaggcaagaacggtgagaatgaaggtttcctcaaacactgacaatggcctagatttcaaatagacagatctgtcaagagctttacaagaatattgtggcgaagatgtcattgggagtgaggtttgagctcttgataaaaattcccatcagctccccagaggtggcggtgaagacacctaaaaaacacacagaatcttctagatttcaaggcttcaggttctcaacatggccaatgggttggtgtacacagaacattatagagggagtctttttaattttgaattctctgtaatgctaaactgtgacttagatgtcagggttaaagatcaccaggagtaaggcataatgatgtatgtctgtgatatactggagactgaggcgagtgagttcgaggccagtttggtaaaaataacaagaccttgtatcaattgtgaagtatattatttgtgttgtattgagtcatacaaaggaggcaaaattgttagtaaaatgtctagttccagatttcagctcactctaaaaactaaatggctccagaagattgggtctgttttaggggagtacagatgccacaaggaagacccattggtgttgccaaggtactttttaggtcttactgtctgctgtagctttgtgtctgtgttagcaaggtggagaggaagataagaactgatgggttgcctgggtggtaggtcactgtataagaaacaggagtaagcaatttcaccagagctcttttttattttatttctttattgtttatgtatgtattttgtgtctgtgccatagcatatgtgtggatgtcaaaagacaacttgggagtcagtaatctccttccatcatgcatgccatggggctcttactcaagttgtcaggcttgatggcatgtacctttatcagctgagccttcttgctggcccaagagtggcagattcttcttttttaaaatgtattttagttttgaattttgcactagtgtctctgtgtgtatatatgcatgtgagtgtgggtgcctgtggaggctggaagagggttttggattccctagagctggagttatagctggctgtgagctgtctgacataggtgctaggtcctctgcaggagcagtatacacttttaactgctgagccatctccagctccccaaagacttcccatggcaaaagtttccagacttttgttgttgtctttgcttttaaattaaggagctgaattgatgattagaaatgaaatttctgttgagttagtatagagttaaaatgctggggtggggttatatcctcagtaacagggtgcttacctagtctacttaaggtcctaggtatgaactgtagcactacaagaaagaaagagttgaagtacaatattgctcctgtatcctagcatttctttttattagtttttagttccatgcatgtgcctatttctttctctgggtatgtgcacatgtatgacggtgtctgctgaagctagagggggtcagaccctttggagttggagttataggtgctttggagcaatccagggagagggctggcaaccaagctcaggttctctgcaaaaacagtatgtgctcttaatcgttgatccatctgtctagccccaattttagcatttaaatcaagaatttatcttgttaaagcaactctctgaatcgtctcatttgtctttatcaagtcacgtatctttcaggaaaggctgaaacatcatggcttctaggttatctttcctggttctgtttgtgtttgagctttatttctagttttactcttgaccgtagcagtataaggaatactagaaaggagctggtgttgtaaataaagtctgtgcatctctgtagacttccatccgaaaccttttgaagaagacagctgaacagtggtcacagaaagcataaaatgccttttccaacctgtaattaatgccttacagatttgttgcagcagtagagatgctttattcctggagagttgagtgccaatgagatggtagtttttgagtcttgaaggctgtgaattagcctggatctgttgtctaagccctcctgaaaacccagtttgaagaagccagccagccaacctcatattttaaacactatattaactctacagacactgcttgctcttcagagcgatctcatatgcattgctgtagtttcccagtgggattttaagcaccattagggaaggactgggcatgataaatctttggaatctttgaggtaccatgtgcagtgccagaaacactagcttttacttttttgagttgttcccatgaacaggagagatggtcaaagtacatgctatctttaattctaatctgtgacatatttataggtcgatatgttggaaagagtcttaaatttggagtcaccaaaaaacccagaagtctgctagtgtgggtacttgagtcaccctttaatacagccctagatgagttacatcaactctgtgagttagaataacactaaatagcaacaccactttcttcactctatacacggatgatttgagaagacagtgaaaaggattatagtataaactggaagtatagaaaagctcctggtacaaaatggtagtactgtagttattgtagataatcttcagtctttattcaaatctacttttatttcttgaccttacatattcatttcctcaaaaatatccttgtactgtttttttttttttttttttttttttttaacaacgagaaaatgttctcaactgaacattaattagggaagtgaaaactgagctttaaaccaaatgaatcacagaataaacctagtttttcccactcaggtgacttaactcttcaatccattgtcagtgataaatgtgatcagaataaggcaattatcttgggagatgttgctggcttccaggtggtaattgctcacttatttttgcctccaagtgtatgacttaatgcatagatttatctttaaagataagtcatttggtttgtggcttgcttgtttgttgtgaaagagttaaattcacacattcttaatagatgtctttaggaaagaaagggtattccagtctgtttaaaacctgtctaacaaatggtcactagtttgtctctttaaagatcactaacttggggcatactttactggttggacaagatctcagattgtgactaagttctaatgagtggttataaaaacacgtgtgttgccttgtgacacttccatgttgctgtttgagttggactctgcattcctattgaattgtacacagactagtccatgttgctcactgttcctgaccctacattgtttagctgtcttggggattgatctatgaacagcatggtgaacaggtataagtcctcctcttttagaacattgcttattaaagataatattttcttctctgaattaacttttttaatttctgaatgttctttaaacaaatcatttactgtatactgcaaaggttaccttaggtttggccctattagaaaagcagctagcataccagttttaggatcaagttataataccttacatgtggaaatgtgtatgctctgcaaaattgggtacagagttttcttaacacatacaaggccttaggagctataggggacattttctacttttaattcaattccacgctttaagctcaagtcatcattttatgagtttagtctctgatgttcctgattagttttgtgacctcgagtaaatctcttaattctctgagcttcaggtttctcatctgcaaaatgagggtaattaatacctacccctaaccacaggcatgttgtaaaagtagcagggagaatttttataaaggattaggcatgtggtgtatgaatttatggtaacaatcttttgtattcagtttatttagttcactagtattcttttgatacaaattaagaacattggtttcatagttgctgtggtttgagtatgaaatgcccaccataggctgtgtgtttgaacacttggcacccagttttgctattggaacctttgggacctttaggaaatagagtgtcattggaggaagtgggtcacttgtggtaagcctggaggatttctgtctgactgtactaatacttgtccaccctctgcttcttgtctgtcaagatgggaggttaagagacctacttgcacattcctgcagctgtggagctgactgtctccatgctttcccctccatgttggtctgtagtccctctaagcatgagccaaagtaaaaccttccttacttaaattggttcttttcaggtcacaacaagaaaaataaccagtgcagtagttacctgtgcaaataactacattaagatactccagtgtgcagcaatgtttgctgcaaggcaaagaatactgatggtgtagacctatgatccaagctacttggcagaatgggtaaggaagattgtaaaatttatggccagcctaggttacagagtgaattcaagtctatttagtgaaatcctgtttgaaaataaaattcaaatgagctgattgataatctgcggtgcaacactacttagcaggctctaggttcaattttcagtagtgaaaaactgtagcctttccctgaccaatcaaatggcagagattgttgaaatggatttaacaatatgatgcaaatgtatagtgtctataagaaactaacttgagattcaaagtcataaatagattcaaagttaaaggatggaaatagtagttgatgcaaatattaaccaaaagagagtagggtgattttgcaaatgtcagacaaaatagactttttaaataaaggaaattacaagagacaaaagacattacattaaaaactaatatgacaagatataataattaaaatatttcgtgtatctaatagcagatgactaaaactgcaagaagtgaaaatgtagagactgaatgggagaagtagcttagcaacaggtggacgtgatgaagaccttgagtaaagggtccaactagacagagcataagcagaaacagaggccataaatgcacagtcagcctgcgaactcataaggaatgctacccaacagcacaaaaatacaaatacaccttcttcttaagtcttaatgtaatggattaaatgataaaaatcatactactcagtgaaatttctctaactataataggtgaagtcagaaattagtaatagaggaagaaaaactaaaaatagtcacgaatttgtagaaattaaagattgtatcaaatacattagtcaagtcacaaggaaaaataaaatatttagatgacaatgaaagcaacataacacaacacagatgcactgaagcagtattctatcaaacagaacacaccatggacacactgaagcagtactctaacatacagaacacaccatggacgcacgaagcagttctctaacatacagaacacaccatggacgcactgaagcagttctctaacatacagaacacaccatggacgcactgaagcagttctctaacatacagaacacaccatggacacactgaagcagtactctaacatacagaacacaccatggacgcactgaagcagtactctaacatacagaacacaccatggacgcactgaagcagtactctgccggaaacaaatcttagaaatcagaagcatcccacgtcatcactgcagctggcgaggaaccagaaaaccagaaaccatagcagaagccatcaaaggaaggaaatagattagcacagagataaataaagtggaaaggggaaaaaaacagaaaaatcaatgacaccggaaaaattttcaggttatatttatgtgtttagcaacacatacacacatgtatgtaacacaactaataaaagaagaggttttgattttgaaatagaacaaggagaagtatatgagagggtttggagaaaggaaaggggaaatgatataattatattaatctcaaaaaagaaattattaaaaaaatacatataattggccaacttttacataggtgaactaacagcaagaaaagaaaactcaaataacagtaaccaaaatgaaaactggcaaattcatgtcaattctacctaattaaaaatgatgttttcaaagtaacctacttgaaatgggcaggatcctagaagtacaaaacctagaccgaatcatgaagaaatggaaatgaatcaatttatagttgataagattgaatcagaaataacaaaaatccccaatagaaaagcactctggactcttctttctttctctctttctttccttccttccttccttccttccttccttccttccttccttctttccttccttccttccttcctctgtccctccctcttttcctccctctctccctctccctctctctctctcttccttcctattttttttttttttttttacagatttatttattatgtgtatagtgttctgcttgcatgtatgcctgcatgtcagaagagggcaccagatctcattacagatggttgtgagccaccttgtgggtgctgggaattgaactcaacctctggaagaacagccagtgttcttaactgctgagccatctcttcagccctggactgataatttctctggggtagtccaccaggcatttaaaggaaaactcactgatctccccaagactccaggagacacatcttaacttcactctatggtagctgtaccctgatccctagcaaaatgaagacactacaagaaaaccacagagtaatctcactttggagcactgttactgcctatggtggtttggatgagatggcccccatagggccatgtgtttaaatgtttgttccccagttggtggacctgtttaggaaggattaagagatatggccttgttgaaagaggtgtgccactggagtgggccttgaggttcaaaagcccacagcaagaccagtccctctctctctgctgcaacttgtagatcagatgtgagctctcagttacttttccagcaccatgcctactgccacacccttgccctgatgatcatggactaaccctctgaaattgtaggcaagcttccattgaaatgctttcttttataagtcatctggtcatggtgttttatcacagcaagagaagaataaccaagcattgctggagtctgatggattctgccccaggctgtgttaaagtctaggcctctaatggtggtgttttttagtgaggtctgtaaattttaggaggtggtatgtaggtgaaggaagtaggtctctagggggtcataccatgtcttttttttttttttcctctgcttcctgttctccataaagtgaatgccctctatcacatgctactgcctcatcgtggaaactgaatcaacatagctgagaactatggactaagctaagtccttcccacttgcagttgttattaccaacactttttcatgacaatgacaatatgatagttataagcaccaatgcaaaaaatccccaggcaaaagaaaatggtagcatgcacatcaagtagctcaaaactgcctgaaactccagctccaggggatctgacgccctcttctggtctctgtagataatcctcacgtccacagcatacgtttacacagacccacacacatacacatataaataaaaataaaacataaataaataaataaataatagaggattaaacattaaagtccagtaggattcattcctagaatgtaagaataattcaacacttgtacttgaacagagtttatgaaagaaaaatctgtgtgaccattggaactgaagttattaaaagaagttggtaaaagtcagtactcacaataaaccactaggtataggaaggctgcctcagaataaaaaaagtcacttgtagaaattccacaatgagcagcatacttagctatgaaagtataaaatggttcttggtttggtttggttttgttttcttgcttgcttgttctgagtctggctgtgtgtgtgtgtgtgtgtgtgtgtgtgtgtgtgtgtgtgtgtgtgtgtgtgtgtgtgtgtgtgtgtgtgtgtccttgaactcaggatcttcctgccttagccttccatgtgctgacattacagatttgcaccaacatacccagcctaaacctggctcttaaaagtgttgctgcttgtctgcttttgtcagttagtattggaagttgcagcctggacagttatgtaggaaaagagacataaaatgcacacaaattaaaaagaggtaaaagtaactctattagtagctgttacgaccttttatgtcaaaaattcccaagactccatcagtagcaggaaacaagtccatacacaaacatgagttacatttctgtccactaaaaatcatactctgaaaagggaattaaataatttgttcataatagtttggtgaagaatggaaacttagaattaactaaagatataaaagattcacagtgaaaattgtgagccattgttggaattaaaagtaatagaaggcattaggtaaatgaaaaacacctcgtgttcatggattgaaagatttaatattaagatgtcagtgctactgaggttatctacaaattcagttcagtctaatttggcggtccggggacttctgtacagacattgaaaaagtctaaaactcattaaaaaaaatcccaagtgatcccaaataaccaaagcagtcttgaaaaagaacgaaaaagaagagctcacagaaaaacagataatttttggtaattgggttttcctttcttcaagttctttgcctcctgtgttttgttgttgttcacttgctttgccttttttttcttccattttttatttaaattagaaacaagcttcttttacatgtaaatcacagttccctcttcctcccgtcctcccgtgccccctactaacatcctacctatcccataccatttctgctccccagggagagtgaggccttccattgggaatcttcagagtctgtcatatcctatgggatatggcctaggccctctcctgtgtgtctaggctgagggagtatccctctatgtggaatgggctcacaaagtccattcattacactatgagtaaatactgatccactactagaggccccatagatttctgaggcctcctcattgacacccacatttatggggtctggatcagtcccatgctggtttcccagctatcagtctggggaccatgagctcccccttgttcaggtcagctgtttctgtgggttttaccagcctggtcttgacccctttgctcatcactcctccctctctgcaactggatttcaattcagttcagtgtttagctgtgggtgtctgcttctacttccatcagctgctggatgaaggctctaggatggcgtataagttagtcatcaatctcattataggggaagggcatttaaggtagcctctccactgttgcttagattgtaagttggtgtcatccttgtagatctcctgacatccttgtagatctccagacaaaaagtgttcgttttgttttaaagtaatgaggatcaaatttagagccttgcatttgttaggtgctataaccatgctgtgtcagaaacatagaggaatatgctttgtatttttatgaaatcagaatttattgaatagcaataaattcacagcatagggcctggaatttgtttgttggagccacagaggaatctttcctaagatgacatttgggacagagaaagagcaagggtttctgcaggaaatgtgctaccttctgtgcagttggccacatcagatcatatcacattagttagaactggcatctcattgctaatgctgaagttatgcattcacttaacatctagtaaacagtcagaacaaaggatgactgaacaggcacctgtcctgagaaagaggaagttgatgactaaaccaggatgtgtcagccagggatcctgagaggagagatgggttgaagatctttgaggcccttccttctgagatgaaccttactttcaagaaaggcaaaaggatcatccccaagtggaactatggacactgccaacttttacagtgaaatctaatggagaaaagacttgtgtcctatgaggccagaacttcaactgtttgtttctacccagaacaactttcttgggttgttttcttgctgaaaatgtccagagtcagtagtgaaggtagcttgggaacaactgaaaaacattgttttcaaacacgaagtcaccctgttctagccattttacgggagattttcctatttcaagcagtaacagtctgtgttcttgtgtttagtgtctcattgttccttctttattaaaaaagtgctttctggggctggagagatggctcagagtttaagagaactgactgctcttccagaggtgctgagttcaattcccagcaaccacatggtggcttacaaccatctataatgagatccggtgccctcttcaggagtgcagggatacatgcagacaggatgttgtatatataataaataaaatcttaacaaaaataaataaagtggctctagtggttccctgtactgcagaagaagcttaccagcacattttcccacctgcaggccagtggtgtgccttttaaatgagtgtgtatatgaagctcctcagtaaaaatccaagttgtgtgcttggctgccaaaataagccagtttatgcacaggccctctctgtttaattgcaatcgacaataaatctgccaacttagtgagagaatagtccattgtttggaatgacccaaactcattttaaattcagtttcctggtgaaaatgtgattgttaattattgcagatgatgttgaataaacaaggaaagtgggagaagaatcaacattctttcttggcttctaagaaaagactctggttctaggttctaggttcactgtccaagaggagcattctgagaagtagtgtacattttgcttctttcctattggtgttttagacttgtgataaatttagagtaaatgaaagaaagatggactttgggaaaatacatttatgtatttggtatatacctgcaaattagatattttagaatactagattgtattttattcatgggagactgggctgcctttttaaaaatatttaaaaatatttatagctgatctctaattaatactgttgcagaaacaggagtttcagaatgtttatagctaatctctaataatgttcaaaaataatcattttctttaaaaaatggaaactggtagttacctgtattatgtgtctttgttgataattcattactagaacttacttgagaaatatttctggtttaattatattactaactcattttctggaattgtaaaatataaacttagtaagactcagtaactcactcagtagccacgtttcccattatcacattaaaactgtgatctggtagcaaacttcccataatccagtatctgggagaatgaggcaggagaatcacaagagtactgggtttcttactgagtccaggctagcctgggctacgtatacatccctatctcaagcaaagaaacaaaaatgtttgaaaatttgtacctgtgtatatatgcatatgacatgtatgtgagtatgcacgtgtacatgtgagtatgctttgtacttgtgggtgtacacatgtgaaggttagaggtcaaaaccatacgtcttcttcctctgtcatttttcacattattattatattattgagacagtgtttgtcactgaacttggaactaaaatgtctaaccagcaagaccctaagatcacctgtctgcttccatgggagattttcaaagtctgtcatatcgtttggagcagggcctagacccaaaagatgcacattcatacaaggaaatgtgttcaaccatgttcatagcctaggcacatgcctttaatcccagcacttgggaggcagggacagacagatctcagtgagtttgaggtcagcctggtctacagagtgagttccaggacagccagggctacacagagaaaccctgtctcaaaacaaaaaagttgaatcctgaatgtatccaagtataatcaagctagggcaagctatataacatggagtttctttagttagtacaaattattgagggtggtggaagtacggctaaaccattttgtatttataaacacttaaaattatggaattgaatgtattcttaataagattttttaatgtagtatcttgaggtttatcaaacctgttttaagtccttccagctattgtatatgaatttcctagtaacttaagtagacaccagaaccaggcaaaattgttattaaaagaaaagtcatttaactatggctatcctttatgacataacagaattatcccacaaatgttagcatggtgaaacaggtgaattaaaaggataacatatcataacaaactgtggtttatcccaggtatgcagtatcatgtattataaaatccagtactggactgatgagatggtttgacaagcaaaggtgtctgtccctaagtgtggtaacgtgaatgcaatctctgggacccagatggtgaatgaagagaagtgactcccaagagttgttctctcacctccaaatgcgtgccatggcaaacacccatcctgtcctcactcactacacaaaataaataagtgagtgtaaaaaattgttttagaagaagattcactgttgttaagatgtcaattctccttgaaattgactatgttttcaggaagacttttttattgttgaaatcaataaacaaattctcaaatttaaacagaaaattaaaagaaattgtaatagttgaacagtttggacaaagaacaaaattggagagctcagggtactgatttcacaacttacagaaatctgccataatcccattgaggtactggagaaagaatggctacatatattaatgacagaatgtttgttgagtgcagagaaagcctgcatgtacttaattttttaattcaaatacagaggcaattcaggagtgctgaaacaattggacgttatgtataattggaaaagaaccgctcttagtatcctgtactggatacaaaattaactcaaaattagttatagagtaaacgtaaaagttaaaaaattgctaaacttctagaaaaaaaaaaacaagtggaaattttagttattctccaacaaaaactcttagattttagttggaaagtataattcatgagaaaaacttgatgtcttgctcttcattaaaatttaaaaacatcagctgctaagaaaatggaagtaataaaagtaaaagcacaggtcgtggagaatatattttcaaagcgtctgtctgacaaagggctgatagtcagaataagtacagaaaatgaagagtctgatagaagaaaactgggcaaaagactttaaacagatgcttcaacgaagagaatgcatcacagagaagatgcacagcactgtgatgtgagggaaatgcaaattgaagccacagtgagagcgcttcatgcctttgcagatgaaacaggttttccagcttccaagttctgaaaggcatttggaaaaactgggtctttagactattgggaatacaaagtgtatggctactttgaaaaattgttagttaacaaattatcatataaagaaaaaatagaagccgggcggtggtggcgcatgtctttaatcccagcactcgggtggcagaggcaggcggatctttgtgagtttgaggccagcctggtctacattgtgagttccaggacagcctccaaagctacacagagaaaccctgtcttggaaaaccaaaaaaaaagaaaagaaaagaaaagaaaagaaaaaagaaaagaaaagaaaagaaagaaagaaaaaatagatgcccaagagaagtaaaaacgtccaaataaaaccttatacaaaagtcatcaacaccccaaataacacaaaactgaaggtgtctttcaatgatgagtaaactacagtacacgaagtaagcccttcaaatggctgtgtcattccatttgtactatattctggaaaatccacaggttaaaaattgatgttagtgttcctgggaaggatgggatgttaaattacaacatgaggaggccatcagacaaatcataaatgtagaatgttccacagttttccaaaatatgtttaatcttgacccgtgttggagaggcaggtctgaaaggcagggagcagttgaggaaatttcattctaggttgtccacattcataatatcagggagctgtttttcttgatttctttagtatggtagtagcatatagtattagagcctttgtttctagaatatgatgaatattaagagaggaaatgctttcgtgtctgcaacttactgcaagtatatacacaaattagaagggaaacaacaagcttgtgattgtctttaggcatcatgcctgtagctagatgtgtaaatatacctatgtacagacacatacatattcagctacatgcatatatacacacatggttttgagacagtctcaatttgtagtctagctggctttaaacttagggctttttttgtgcctcagtgtcccaagtgttagatcacaggcatgagccaccacaccaaattgttttaactttgtgcagatttgacactttttatgatagaagggctcagttgatgataataatatttcttcaagatggtcttgtgatgtccagggccttctttccagacctctggccatctgggatctgatctaagaatacctttttagtgtgtgcagaataactcaggtttacattgaacactgaaagaacccatttctctgaagtgctttgcatagcagaatgctttgaaattttgcttacttatcacacaattctcttttggggaaagagaactgggtttcagtaacaagaataggcatagtgcttctgagaaactggacttggcttgttaccaacagcgtgctgctaactgctggagctctcagtactcacctgtggcccatctccatctccagcaggtctgctccagctgtgctcctggtactgggcttctcctaccttacttgtatccctgcctcattcctccagctggtgctttttttttttttttttttttttttttttggtggtggggctatatttattttgtgagagactatgtcctgtggtaatctatctggagtaaaacggtttaaaataattttgttggtggggcgggggtgaagtttagtggcttcccatgcacaagaaaaagtagatgaaagttaatgatttttaggtcataacctaatgacctagttccacattatagttgttgggtaagtgcttgtgagttgtttatcctctagtcaagttttgagtaagagagtgtctctgaaagttaaggctgagactagaggattgggaattgaagaccaagactgtgctagcagtgctgagtccttgcataggcttcagggacttgggcctgagtgaggtggcaagggaatgaaggacagacagacatggatggacagaagaaagcaaactgggcttgggtggtctagactgtctgccggagaagccacagcaccctgggagctcagtatgtttagtatatagagttaaacaaggagtcagggtttgggaagtacagctggatcaaggagacaagactcagctaactctgtaggagcagtttctgcagaagagcagtctgcaggccgggaacatgcaggggaagaaagaaaggctgacattctcttcagtgtcagcctccacacttggaccagaggaaagccttcttctcatgcttcatcctcacccaagggagaaggccctgccatttctccatgggcctgaggccatgcctatatgaataacacatgcactcaggatgtcactcccctcccgtatacctgagcaaacacacacattcatccccctccccctccttcttctccctttctccctccatttctgtctctgccattctctctctctctctctctctctctctctctctcacacacacacacacacacacacacacaggaatgtatgtactcacccatgcgcacacacactgagcattttaaatataattaacacagaaggttcctgtttccagagtagcagtaatgtagctatctcagtaaaactccttacttacctgaaacaagatcgccaagcccatctgtggtgatccttgtcggcagcagttggaatagacattttcctttaagatttttttttcaattaagagaaataaaatacgccatctgcagttgttttggttttagcattgctgaaaaaaatttcctcatagcaaaaaaatcctaaagaaaaattactagttgttttaaatttctttactcttccaaatggtatcttctttctgttaagtgacactttgtaatgaaatgctcatctacatgttgagacatgttgtagttactttgtgttgctaccttccaagactctaaattctcacccagttcctgtttgtggttgtgttattccattatggaagatttcttgtatgacaatagaatcttcatagctgggttaattacactgtaatatcctggtatggattgataagcataggtatttttaagacattatctctatgtttatcaggagtatcttttgatgtgttaaatttattttgacttttaagaactatttaatttttctgtaactgattctctgtagctgattcctaagtatgtgcaattttactcttttaaaaatctggaagttatccaggcggtggcggcggcagcagcggtggcagcagcggtggcgcacacctttaatcccagcacttgggaggcagaggcaggcgtatctctgtgagttcgagaccggcctggtctataagagcaagttccaggacagcctccaaagccacagagaaacccttctcgaaaaaccaaaaaaaaaaaaaaaaatatctggcagttatgtgtgctggggtatacccgtgatctctacacttaggacattgagacagggggattgccatgagtttcaagccaaactggactacccaccaagttccagaacagccaagactactacatagcaaaacttgtaaacttgtctcaaaacagcaaaacaaatgaaagatcatggaaagcagtctgttgaatggattgatcttttttataaactaacccctccccttggtttcttttgttttgtttttgtttttctgttttttgagacaaggtttctctgtgtagctttggagcctatcctggcactctctctgtagaccaggctggcctcaaactcacagagatccacctgcctctgcctcccgagtgctgggattaaaggcgtgtgccatcaacacccggctctctcttggtttcttaagacaaggtttctaagtgtggctttggttgtcctggcctcaaacccagagatccacctgcctctgcctccccagtgctgggattgaaggcatgcatcacccagcataaactaagttttaatctatatatgcacagtagcctgtgaccttctaccttgaggggtatactaaacaaattgctgaaggaggtttggatgcaaataggagtgtgtaaggtaagattgcatctcctttgcccaaaatggaacaattcctggaagtagggtctgtctgtctttgctcacctctctggaattgtcccctttctgtatgtatgtattttaaatacacatactttttgctgccatcctcattcatttcttaatatataaaacaccaagttaattttgtagtagctccaattgatcacgtgaaccctgtacaaaatttccatttataccgcctcatggatcactcagaacaagttcccacaaagacctgttttgttctgcagttggtccaccctaacaaaaccagtttccaaattatgcagggctttataaatcaagatgaactggtcagaaattgtatagagaaacaaacaagaagccagctaatgcttcctggttggcaagcagtgtgtgttaatgtactgcaatatcaggtaatgaaatttcctgcattctaagaatactctaattagaaagcttgtttcacattgtaactttggttcgaagccattaactattcttgtattcgttaaataacaagaatacaagttgaaagatacttcaggcaagagatgatataagacagttgatgaattatgaatttgaagtctatgtttcttagccatcccagcatgtggtaactaaatgccagggtgcagaggaagaggggtttggtctgcgggcttggagctcctctatagtatagcataatgacaatgaacacagaggcatgttgagcttgctttccctgggacagtccattgctatgtcagaaagtaaggaatagacccatacgtaattcataaataacagtatattgtgagagtttagctgagatataggtattcaaagcattatggacattaaaaatgcccttgatttttagacatagagcaaggaattaccagcctacaatccacacctccagaggagctagggaacaaggagaaccccaagagaagattgcatagttcctcaaagaaggggagggggacaagaacacctgagcaaattggaagcatggggtggagagagaagaaaggtgggaaggggagaaggggagggaggaggagaacaagaggactgagacaggggaggaatagagaagggcgagaaaggagatgccttgatagagcgaagcagtacaggtttagagagaggtctgacacaggggaaatgttaggggatccacagggatgaccccaactaagagtccaagcagtggtggagaggctgcctttggtgcccttttcctataatgagactaatgagtactttggttaccaattctagagccttcatccaggagcttgatcaaagcagaaacaggcacccacagctaagcacggaaccatacccctgaaatccagttgtggagaggggggagggatgagcaaaggagccaagacagtgctggagaaacagttgacctgacctagtgagagcacggagatcctagtcataaagctggggatccagtattggactgaaccaagccctctgaatgtgggtgccagctaggaggccaagacagtccatgggacctctaacagtggagccagtctttatccctagagcacaaatggactttgggagtccattccctatggagggatactattgcagcccagatacagcaaggggggccagccgccaaatgatatgacagactttgaaggtcccctgggaaaggcctcactgtccctggggaggaggtaggggtgggttggggggtcttggtgaggtacatggaagaatgggaggatggatatgtaaatatgagtgcctcataaaaagaataaaaaatgcccttgaaatatatttattgttttccaatacagttttgtcagattatttcactttgtcagcttttgcagctaaaagggcctttccagttaacttcagctgacctagtcaaaacactgtgttttagctcaaatagccgtctaaagaatctgcatcttgtgtgatgtgtttttccccctttggagaaataaaagagaaaaaaagaaaatgtcttttgcaatggcaaatatcctttccaataatgggcaaagaccagccttcttctttcctcaaaagaaatgggaggactccaagaacctaaatcctgtagcatgtgaacgtgtcatgtgtaagatctgaaactattacagaggacctagggcacatttaaactcttacttgtttatgcaaacacaatttgagagtaaaatcttaaatgttttctttcccctaaagttctttcttcaccagatgtccatgttcacatcatgtttacattcatgttgtattctcataaaaccaagagaactagaggagttttgtttgtttaaggctgggccgctaaggagtgtttgtaaaacattttccttacataggagcacaaaaatgaaacaaaatgcccttttgcttctggcttgcttctcactggcccattttaactttcagttactgctatcctagataaactctgttaattctcattatttagtttcattcagagtcactggtagaatttgaattgttaaagtaatcttgtgtttctcttattagatttttatataggtttagtttacaaacagtaaaatccatgtgtcttaattgtccaatattcgtattgatctactatatccgggtcagtgaggactactttctcaaagtcaccttggaaactctttaacatgttggcagtttggaactattgccttttaaagaaccaaattgagttatatacataaagctcatgatatgtcatggaatctcacacagaaaaagttagttaatgaatttaactttgtaattgtttttagttattttgtgtgcatgtgtgggtgtgtgttccatagcatgtacttggagatcagaaaacaacttacaggagttggttctccttccaccacgtaggtccaggggattgaactcaggtcctcaggcttagtggcaagaacctttacctactgaggcatttgcccacccaaggttattttttttttaagattttatttttattatatatacaacattctgcttccatgtatatctgcacaccagaagagggcaccagatctcattacagatggttgtgagccaccatgtggttactgggaattgaactcaggacctctagaagagcagtcagtgttcttaacctctgagccatctctccaacccacccaagattatttttaaaacattcccatgaaccttttaatggtgcttgtcatattggcttttggatgagattcttttttttttttatctttttaatttttttattttttggtttgtcaagacagggtttctctgtggctttggaggctgtcttagaactagttcttgtagaccaggctagtcttgaactcacagagatctccctgcctctgcctctcgagtgctgggatgaaagatgtgtattaccactgccaggcttgaatgagattcttaatttatgtatttttatttgtttttagaaaattaatgccaaagttcatgatggagtatgtcagcgctgcaaagaagttcttgagtggcgtgtaaaatacagcaagtacaaaccactgtcaaaacctaagaagtggtgagtcaagtttcttaaattccttcccagtgatgcgtgtgtcatagtgtcttagtccatttcctgattctcaaatttgtctagataaacttgaaagaaaataaaaagaaatctttgcctctagtgtagaatttcatcttgaatactgagtcttagtttatgaaagcagcagatggaaaaatagattgatcaatcctgactcatgattttgtacaatttttatagaaactttttctaagagtggaaaaggcctcggtattacaaaatcttgttttccactgactaagtaatagtatttactatagagcgttgtttatgatttttgttttagagaggatgacctagaccagcctccaactaatgaccctcacacctcagcctccagaatgctgggatttattggcctgtgccaccatatacagacatgacaattcttaaaaggagtctgacatcttaattcaaaccatgaagattactaaaatgacctgggttgactgtcttatgtgaattactgtttataatttgcagtttcattcattgggtcaagatgaaaagatactcagcttagtttctcatctgtctgcccctaacctttctataattatgggtcacttttgcgtcatccttatatacatcctttttttcagctgagtaaggacagttaaataataggtgtgtcaaagaacacgactgtaattactataaatattagtaattctttttttttttttttggtttttcgagacagggtttctctgtgtagctttggagcctatcctggtactcgctctggagacgaggctggcctcgaactcacagagatccacctgcctctgcctcccgagtgctgggattaaaggtgtgcaccaccaacgcccagccagtgtattctttttatattatttaatttggtgttctgtgtagtagttatttagaacaaagttggtcattgttgctttatatatatatatatatagagagagagagagagtaaaaatactaaaactatttagtagtagtctttcttgaacatacacttctttttacttgatacttacgtatctatttgtctgtttatctaatctaactatttgattaaaccattcaagttacctgcaaagtaactggtctctttatggcatttgcatatactgtatctttatacatttttctaatacagtgttttcccctttggctgccccctttttgcccatcctcttcctccttccaaatagtccctacttctgctttcacgccacaaatgttctattaccctcacttatctccttccttcatcccttaaggttttgtcttccactttcatggttccctttctaattgcatggcacacacaacaacctagatctacatgggagagaagacaggcaagattgttgtttgtagtaattcccagttccatccatttttgttcaaatgtcatttgtttttctgtgtgactaacttttcatcatatatatgaaccatccatgttctttatacctattcatctattgagggttgtgtagtgtactttctagctatcataaatagagcagcaatgaatgtggatgtgcaggtatctctgtggaatgttgacttagtccttctggaatatacctagggttgatgtagttgggtccccacttgttaggtgtgtatgcttgtttgtttccgttttgaggaacctcccaactgatttctatagtggctgcacaaatttccattcgtatcaggagtttgtaagcgttctttcctcacacccttgactcgttgatgtgtattcccagcccctcatttgttttcttgatgatagccattctgatctgggtaagatgtatccccccatttctacctccctagcactgggattacaggtcataactgccataaacagcctttttatgtatgtgctgggatctgaactcagatccccatgcttctgtgcaggcactttcctaaccgagccgtcttccgagatcccgattattgttttatattgctgacttttttccctaggttctgggttgaattagtctggtattggtatctgttttgcatgtgttcatttcttttgtttgtttgtttgagacaaggtctcactatgtagctatagctgtcctggaactccctgtgtagaaactcactgtgtagaccaggcaggctttgaattcatagagatccaactgtctctgccttccgagtgctgagattaaaggggtttgccaccacttcctgacaggttgttcatttctcatagtaaactttggatctcctggcattgtgcccagtctggtgtctctgaacagttgtgctatgtaggtttctcatgtttcctacatttcttttttgggatttgatcatctgctgggatgtccctttttgttgtatttgaggatcttattgattagtttcctcttgagatctcagttagccatatgattcagaggcttccaggtctgtgtacaagggtgggagctgactgcattgtagactcatctttcctgtgctttatactgatattgaacctttgtggcacaagtgttcagtggcctccggcattgtcttcacttgagtagttgtagtagtttgaaagaaaatggtcccccaaaggagtgacagacacaaggaggggtgcccttgttgaagtaggtatggccttttaggaggaagtgtgtcactgcggggacaggctttgaggtatcttttgttcaagcttcactccatgtgacactcgcctacttcctgttgcctgcaagactcgggactctcagctcctccagcaccatgtctgtgggcatgccactgtgtcccaccatggtgttgatggactgaacctctgaactgtaagtgagccaccccaattaaatgtttttctttataagagttgctgaggtcatggtgtctcttcacagcagtaggaaccctaattaagacagaagtataccatctttctgtatcaggagcctatgttaacacattggactctgcagtctgtgggccaggcagctttctctcgccctcctgagacttcagtgatcatgcccaaggtagcttatgttttagctagggaacatctcactagaacatcaggagtggggaagcaagcacagccctgaaggctgtacacaaagtcatgttctttaagccttttaaagcaccatcaccctgcaggtatgtgtcagatattcctgtgggcttccagctctccagctgggttacattcagttgataaaaactggtccaggacttgggagagcaggagtgcttttctctgtgcccttctttcctgggccaggcttccttgccctccacaaccaacccataggactgtttctgacatggcaggttaatttagccttttaggagtttggatagccttctaactacagtagagattatcacatggtgttaatttttagtgaaaactattttagccttcttacagatctaacactccaggtttggagcatttaattccagcactcactgggaaggcaagtggatctctgtgacttcaaggccaacctgatctctatagcaagttcccagacagtcaaggctaacccatctcaaaaaaagaggagggaggggatttttaatagctgtcagtattttaattttggctacttattttgcatgggtaggtgtttcttgatattaaaaagtctcaagaaagcatcaacactaaattagctatttaggagtatttctcactatttttttctattgggggtattgctgagttttcttttagatagtgttatatatgtcttgattattttttcagtgttttcttcctgctctatagcatctttcttaaagaaaatccattcagtggctgaaggtgcagcacaggggtagagttgtgcttagtatgctgacaccctgaatccgattcccagaatttaaagccagcaaaccatggcttataaacaagcctgttgaatcttatgctaagtcacccaaattggcagcaaggaaattaagctggaggaaaggtggttagggcatccaactttagctttccatgaatgaataattgttttctaggtagcaattaaaaactagctgtgcattaagccatgtacttgtagttaataagccaaacacatgataagtggtttcagagcatttcctatacggcgctcttcctctaaagtgtggaaggtttcaccactgttccatttccccctggcagcttttctcccaaagccatttaaagtatatacagtagacattacagagccttttagcagacattgtaacaaatgaagtcacttaactatatttcttccatgtctattacttgttcttatctaggtagtctgctgagtcctgtgtgcttatctttgttatgaggatgtcactgtgtaaaagatcactagcagactttgctagaaatggttatttcttgtctgtctcatgtgatctactgttttatcaagggagatgagagctaaaggggactaaaggcctgctgtctattacactgaaggtcatgtcacaacgtcagaatgaagtaagtgacgtattatataaatacaaaatacagataagtcattgtggtagtttgaatgtagttgacccccataggctcatcgggagtgtcactgttagaggtttggctttgttggagtaggtttggccttgttggaggaagtgtgtcactgtggggatgggctttgaggtcttatatatgctcaagccacacccagttggacacttcacttcctgttgcctactgagcaagatgtagaactctcagcatcttctccagcaccatgtctgcccatatgctgccatgtcccacatgataataatgaactaagtctgaaactgtaagctacccaattaaatgtgttcctttataatagttgccatggttggcccggtggtggtggtgcatgcctttaattccagcactcaggaagcaaaaacaagaggatctccatgagttcaaggccagcctggtctacagagtgagtgccaggataggctccaaagctacacagagaaactctgtctcgaaaaaccaaaaaaaaaaaaaaaggagagagaaagaaaagaagttactgtggtcattgtgtctcttcatagtaatagaaaccctgactaagacagtcattaagggaaatcaccaagaataaggaagtccaagcaaatacaaagcaaagcatggctcccaggagcctgagaaatactaatcaaagcaaagctctagggagagaagagaggaaaagcctttttcatctgcccttctggatcgtaactgggattcagtatctaaatcgaagcaaaacccaaacctgctaggcttacacttgtaaaccctgcacttgggaagctgaggcaggaggaactcaagttcaaggccaacctaaaatatataaggagttgcaggccagcttgtgatacatagttcagtcctctctcaagaaaccaggaaaggaaaggatgaagagaggattaaaccctagtgttttcacgccaggtgtgctgaaatgtgggaagccatgggggattgtaatagaacaaagcagtgccatagtgagtcataaggcagtgggtgggggtgttgtatggcttaatgtgtcccgtttctcctgtctctgtccttggacataggatgcttctgccttttaggagtcagcaggattcctcttgaagggaccagcgaacccctacttcccccacccccagatttagcgactgtgacaggttaaaatgtgctcacctgaccttggtcactaggaggtcagatgcccttctcatggcaaggaaagttagctggcagggctgtgctctatggctctgggtgtgctttatggacaagtgcacaacagtgacgtgcagagcatagcaactgccctgggagggcctatgggccataacaaccagttgaccagtcaacacaaggtgggtcgtccatgcctggaggcacaccaatcctgagcctgtgtgtacccctagatactccccttacgctgccctataagatccctgccttgtggtttctcgagggtcttttctctatccatctgccatggtgaatggatgaaggacctgagctaatggagttattagctcattaaaaaacagcaataaaagaccctttgctttttttgcatcgaaatggccctcttggtgatttgggggtttcagaatttgggcacaacactcacataagggccttccagtacctgttctatcttggattctggaagcttaagatggtccttaatccaaggcacctttttggttagaatgttataaattcctataatctaaaaatgttactcatggagtcaactgtctagtcttagaacaccatgactttctgattatcgtgacacgtggcacatgaggcatgctgggattttacggtccagtccatgactgcagtgttggaggaatatacttcacctgtatctgttttacttcactgtgtattaagatatatcttgactctgttgatgatgctgacagtaaaacttaatttaaaatgttaagcactttattcaagccaaccacccagaagaattatcctttgttaagatttatattccaaatatacagatgctcctcaatttagaacagtttacatcccaattaactcatcatataaatgaaagtacctcagtttgaaaaatacgctgagtatatcattgtatcatattttcactttatctaccttaaaatgctctgcacccctagcctatagtagggcaaaatcacctagcacaaactaaatcataattggtatgggatatcttaagtcagtagttgaatgcatccgactctctcagtgcaggccccagtctgtggctggtgggttattctatgtcagcctctcctgcagtactaggacaaagttagatacaggctattacattattattggtaactttgtttaagggatgaaaggagaaatatgggtatttgctttgtaacgtgtctaaagtgatggcaggaaaaggttgcttggggggtggtgagacatttcaggcctccatctgggtgctgtgacatgctcatgaacatgtacacaggtgttctctctgtgtctctctctcaataaataaataaataagcaaataaatatttcttttaattttaaaagaatgttgcttgattacctgaaacaaaggcattgcagaacttaaaagtaaagcctatttgtctttctataagtacacatgtttaaaaagaaatgcacagggtggtttctaagcagaatatgttaaactagagtccatgcagctcacagctccagaccattccaataaacaagattgatgacatttctaatatttagtgtagcacccagcttttgttgagtggaaggaaaggacctttggaatgattaatactgactgtgagagaacaggagaatggggctttgggattagttgaatttgcatttgaatctaaactccctgtgctttgctttgttttgagttaaacatataatccccctgacccagggcatttaaaaaaacccagaatttatttcatttctgcccttcttgtacctcttaagaaaggggcaaaaatcttttaaccattaatgtaaatgaaaaggtgtcaaaatttgttgacaccctttagaacaattattttataagatctcttacccttcatatttaattgcattgaataaattttactattcctttcaaagttattgttgcacctcatctcacctgttctcagacatctctgttggtccatagataataatcctgtagtttaacaaatagaaaggggctggagagatggcttcatggttaagagtctttactgctcttgcctagaacctccgttccattctcagccctcatatggtggcgcacgtgcctgtgattccagttgtgctgggatgtgacagcctcttggaggctctgtgggctcctgcacccacacggtggacagcaattcatcatgccagttcacacatgttacacataaatgaaaagtgaaaaagaaaaagagtaaaggtctaattctcttagttgttttaaagagttcagtagggagttggattgtttgacctacatgctgcactgttggagcaggggatggagggagggggaggcgtctatcaggcaggagaagccaaaacaagtcatgtttggaagacattgagagagggcttgagttgctgccaaggacctcatgccaccatatgttgtgtccgtatttatggggcctgtgccttccctttttcttttagtcatttgagacagacttgccttgagtctctgatcccctcaccaccccctaggtgttggggtcacaaaggtggggttccactccaggagctcatcttttcttagtcttgatagactaatccctttgtttcttctgatcagtcaatcagtttgggttttttctgaaataggatcttactgtatagctcagggtagcttggaattcttatatatcccagactggtctaaaatatatgatccttctcccacagcctaagtcagttatgcttttaaaaggatgttgatgcagaacacagctcttacttgaacaggagtaagagttaatctttttctgagctaagtatgagttcctgtagccaaggacatagagttgagttaccctgaatggcatgttcccccatggcagtgttgaaagtgtaagagaaatcaagacacttccatatacactggtgatgacagtgggtgggcagctgccttgaagcaggagtcctttctataggtctcatgctagctgagcactttcctagccttctgggtggtagaaattagtgctctcaagttaatacattccaaagattacctggcagtcaagggacattattggcaatggctgttgactaggtatggccaggtaattttagctctgtctgttaacccaactctccacaatcgagtaagttttaattagtcaccactctggtctgtagactcttcaatgtgggtgtggctttttcagggaaatcattcatgcagaagttctgtatccctgaacttcttaataatgccctaattctaaatgtgagcctgccttttcagggaaggctgatggaggaagatagtttgagcccaggagttcaggacagcctggtctaaaaccacaaaagagtaccactgcctcatttttcagaggaaacatgccattggttcacagagaacatggtaatttgtgccagtcccttgcttgtgtggctctggtactgtattcaataatagcccattggcattcactaattgtatgcgttggctgagcagacactactgcaataccagtctttctgacattataaccctcacagataggtaacttctatgacacccaaggtattttcccttctgttcttagagctggatgaatgatgtgtgccactgactagtgcaagctacccctcattctccataaaattataaagttcataattcaagtggtaaaaattagatgtgtatgtgcttgtggccttaagattggctttctatagattgttttatttttaccaattaaatgtagcacttgggttatttatgcaggtttttttttttttttttcttcttcgagacagggtttctcggtggctttggaggctgtcctggaactagctcttgtagaccaggctggtcttgaactcacagagatccacctgcctctgcctcccgagagctgggactaaaggcgtgtgccaccaatgcccggctcatttgtgcagtttttaatttcgggtttttacattagagtcttagaccaagtgggaaaaacaatatattcattatatttcacaaaatttatggactcagaaaaagattggcatgtttaaatgttgaattataattcactaagtttaccagtgtgaagcttaagtgatattatgaatttcactgaaataaatacattaacaaaaaataaacctgttcttaagcatattcctactagatcagtgaaaattttgatgacttcccacatatatatcaggaagaggaatcattctgaaatacatcaggagaaagggtatctaataattaagccttcactgaagggatatttaataattgagctttcattgagggatttttaattatgtgtaggtgtatgtcagctagtgtccacagaggccagaggtgttggagtccctggaactggagttacaggctgttgtgagcgctgggaaccacgctcaagtcctctggaacagaagcactgagccatcactagctccctaagggatgtttaacaacccttcatttgtgacctcttctctctatatgagaggttctctgtgggtcatgatgtcttacatgctttttatatttgtatttcgattcacaacagtagcaaaattagagttacgaagtagcaatgaaataattttatggttggggtcacaacaacatgagggaactgtattaattgttgggggtcacagcattaggaaggttgagaggttgagaagcactgctctatatagttgcaggaattgcctttatgtagtttatatgaaaaatccaggttagtgtgtgatggtgtaagaccctcagaaagctgaggcttccagaatcttagcccaggacgacggccaccccaaacacagaatggaggcgaaagcttgatgcaaactgcatgaggctttattgtagtttaacgaactaaccccatgttagctcaggtcttttacccacccgccatggcggacagctagaaaagacggctcctaaggtctccccaaagatcttatagggcagcataaggggagtgtctaggggtacacacaggctcaggattggtgtgcttccaggcttggagggcttgccctgtgttgattggtcaactggttgttatggctcataggccctcccagggtggttgctatgctctctacgtcattgctgtgcgcttgtccgtaaagcacacccagagccataaagcatagcgccaccagctaacttctgattggttccttgtcacgagacaggcatctgacctctacgtgaccaaggcaggtttatggcaagcacgtgttcggctgttatggctgccaaaagggaagccggttccttcaatggcagaggttaatgaatgaagattgttgagtaggatatgccatctggcagaatccagaatttaaggatagtaaaggcctgaattgtagttgttgttttccatctccttccctgtcactccctcccccaaccccacttcctcctccataagcatggtaaagatactgtaaatagttcacccctgctgttgggtacttcctccaactcctgtaatacaatgtgacttaatgaaccaggattagggttgacactgcagatcaataaagaacttttaggaaggattcatcttctgggctcactcacaaacggctttgttattatagaacacttcccatttctcatattttcaaaatgcttttgctatttaggcttggaaaatgatgtagcctctaaaattagaaattattttctattaatgagtaatcataaaaattatttcaataattctttgtagaaaattgtcaggaaactgatacaggttggagaaggagggaaaagagaaatgaaaagatctcaaatggggctagctgcctaaagaggttgtcttagcactctattgctgttatcaaacacgatgaagaaaacaacttgaggaagggtttattcagtttacgcttccacatcacagttcatcatcaaaggaagtcaaggcagtaagtcagacaggccaagaacctggaggcaggagctgatgcagaggctatggagtagtgctactcagtgactttgtcatcatggtttgctcaacctggtttcttatagagcccaagaccaccagcccagggatgcaccactcacaatgcgttggaccctccccatctatcactgattaagaaaatgcccttcaggctggccttcagcctattcttatggaagcatattcttaattgaggtaccctctcagtatcaagttgatataaaactaccctttacagagttcattaatatccttatattgaatttagtatcctttcaaaactgtgtcaaaggagtggagcctggtggtaccttggatctctctgagttcaaggctagtttgatgtacatagtgagtttcaggacagccagggtcatgtagagagaccctgtctcaaaataatggtgacggtgatggtggtgaaggtgatgataaaacaccctagtctaggctattattgcagtaaggggaggtagtatttattacctgtctgtttaatctggagacaccaggaaatgagttgtaattactatataagttatttagaatgagggtaggaggtgttttttcttaaaaagcactaaaaactatagtaggagctaatcctatagtttggttttagactctccttattgtaaacaacatcggttgcttattgccttgggaggaagtgcctctgtcaatattgagcttctttcatttgcatatcaaagggtgaggtgctgacagtctctgtttaccaaggtgcatagtcattctgtgtgcacataccacaggggctaatgatggccaagctcagaacatagcaaccaggaaactaaggcagaattgtgaaagcagcagagggaagttagtttctgtcaactactaatctattttatgtttatgtcccttcttaaatcttccttttactatcaaaacaacaacaaggaaacctcctgaggtctttgtttaactctgaggttgcagaaaaagtgaacacatgtaattcagatgtcacagaacccggtatcactgacttgtcatgctcgagtgccagcagtttgggtactcattatgaagagtgagactcaacagtagttatggtgatttttaaagatgatgtaacaggaacttgttaaagctgggctagtctcccatctcaaatcatgttcttttcttctgttttatttccaaaatattttctagagcttagtatgatacataaaaaaaactccccagtttgttcctgatgtcaagtagtcaacccttattttttcttttgttttgcattgtaaacaagctatgctgtttttaaagatgtaactgaatcctttatcagtaaatatggtttataagagcaaattgtgttttaagttagccagatttcccatttaaactggttggttgtaatatatacatagccaaaaataccttgagtgattgtttctgacaatttctctgtctctctctgtctctgtctctctctgtctctgtctctctctcacacacacacaatatgaaaaggaggaaaaactaaggtaacacctgtgatgttttcttaataaattgctataaatgcagcaatttttcaaggaaaattaggaaaaataaatatttaggtgaatttaaagttattccataccacaaactttataagaaaaagtacttaggagtggttagagatttaaaggtagttcaagatgtcttaaaatactttatgagttttgtgcaacttggaagggatgcctaatacagtgctatgtaaactaccctcatactttacaactatcaaactcctatgggtttacaactaagtgttgtattgagtttaaaaaacaattcagacctctgttagctaggaaactcctctcctgtactcactgcacatgcacaaagcctggattatgttttaaaagaaagggcacactagcattcctcttgggagacagaaaatggaatctgtaaagaatgttgtcattccaatggccaacaacagacatcacctttagagaaagtgaaaagccattttaagtgaggctctttcctattttcattcaggtatactatcctaagaaaactttgttttcagctggaatttaacttttaaaagatcatacataattgctttcagatttcattctgttctcagaatcagtcattgtaatctccaccaggtcggggaaccccccacttaggattggaggtctttttattatgctgggtgtcaaaagttctcaaatgtttgtaggcataagagtttagcagattcatggggcctagggatctgcatttaacaactgatgtttaccatgctggtgtgtgattcctgagagtcaccctttctgcacagctaaaggatcaggacccttttggctgcaaattgcaaaacaaagagccgctttaaagattttcatgtaaatcttaacactgagagttcccatgaataccattttagccctgcattagcaatttaaatacttaaaaatttgttgtttcttgaggtctctagcatcagacaaataattatcaagaagaaaacacgctgtcatttccttgaattatcagatgactcaaatcaagagacttaacattattttaggactttaagaaattaaagccaagagtgttatggaaactttcataagccattggaatgattgggatttttccgtcatgatcctaatagtgtgatttttaagtctatttttaagtacaggataatttagtaaagctttttgaaatgctagaatccaagtatacaaaaacaatttaccacagcaattttaataactgttttcatttagtttctatgtcaaaggtttttattatcttaagttttgcttactttctaatttctcacagttgaggctcttggaatgtaatttgttaactctgaaattctccctttgccatgtgcagttgaagttttaacctatacagttgtgaaatcagcatcacgtggaagataagaaattgtaatcacccacaactttcttcttgtcactttagagtcagtcctaccctttgccaactgctggcaagcactggtctgttttccttccctgtactttgcctttcctgaataccagatgtggggaatcttacaatggagatgtgagtagcacttctgaagctaaatgatgtttgaagttcatccattttgtatatctagtacagcagagttttatgctctggccagctgagaaacatttagggtgtactatattttaccactttaaagttaagccattgttaatattcagacagggttttgtatgaaaaatagttttcatttttcttgagtaaaaattgcatagtgagattattgggttgtaagttaaggatatatgtgttgaaaatatgtgggctgcagggtctagagagttgactcagtggagaatatcacttgatgtgcaagcatgaggacctctgctctgatcctaacattcacattaaaaagatgggtattggcccaggttcagtgagagaccctgtcaaaaaggaggaaggaagagggtgatagatcaggacaccaatgttctcttggcctcagggagtgtgcacacaggcatgtgcacctaaatacatacatacacacacacacacacacacacacacacacacacacacacactcacactcacacacactggggggcggggacagagagattgcaagttactttctaaacttgccatactttgtgtgcttgcctacaatgtatagcaatgtataggagccctgcattatcattaccactgaagtttttgttttattctactggagtcctcagtgagtggttgcatctcactgtgattttaattaccatttctctggtgaccagtaatgccacgcatcttcatatgctcatttgcatttttatttctcatttgttgaagcctttgttacgatcttaacagatgtgaagctcatgttttccccaagtgttttgatagtactgaattcttaatttcttcatgtatcacttagtagcagtgggaagaagccgggagtcagccccacactgccacctgacacagactggggaggggggttctttttagaggtctccattcaggtgatgctgggactgggactcttctgggggtggtggtgcgtgaggataaggcaaagctgatttgtaataggaagaaggtttgtagatttaagcacaggattgttagaggtgctcgggaaagagtgaggcgagctggtgctacataactgagcagtactgtctgtacagtactttcgaggcttttggaagggctttgcttaaagggcttctgaaaactctccccatctcttctccccttttccataagtgagatggtaccgtggctctgaaggtaccttgacctccttacagtcccataaggcaaaagtagggtcataagggtttattgttttttaaactcaaaaaaaaaaagggacttttttgtttgttttgttaactgtaaatggagaggttcttgccttgtgaaagttgtgtaaaagcagatctacaactggaaagtgaagggcttaggctttaagtactattcattgctattttaatgttcttttttattaaaaggtttacatacaatatattttgatcatattcttttatttcctccaactcctctcagttcctcccactgagaagctatttgtgattgatacctgctgggaaagggaaaaatcattttctccaatagagaaaaatatttcatctacactccaacacaggccccaaccacaaaaccgattccatgcttttctgtgtactttttgtttggtgtgctattacaacagtcttattttaaaagcctgtgtattaaatgacttatctgtagaggcaacttgcatagcagattttaactgacctgtagttcttgaccatcacacttcctatgtcactttcaatctaccgtccctatatccattgtctctttatgaatatttgtaaaatatgtggtttgtaaatgtttactgctaacttcctgttctccttacattttcagtgcattttaattaattttcttgatttttttttttttgagcttggcaacatgctagaatattgtacatacaaaggtaagttttaaaaagtagtctatgtcttctagggattccaacctactgaacagatagatacatgtgtgaataagtagttggattattatgccttttttttttgccttttattgaaaatagattttttctgattatagtttttctacttttctcagtttttccctacctctctcccatctggatccacccccttttgtctttcattagaaaataaacaggcacctatgggacagtaatacaataaaatataatgagataaaacaaaaacaaacacatcagaataggacaaagcaaatagaaagaaaagagcccaagaaaaagcacaaggaacagatacagacacaatttgttcaaatgctcaggaatcccttaaaaacactaaactgggggctggagagatggctcagaggttaagagcactgactgctcttccagaggtcctgagttcaattcccagcaaccacatggtggctcacaaccatccactatgagatctggtgccttcttctggtgtgcagatatacatggaagcagagtgttgtatacataataaataaaatctttaaaaaacaaaacaaaacaaaaaaacactaaactggatgccataaaggatttgttgggttaaaaaacaagaaaaaaaattaaatatataaataaaataaaaaattaaaagccctgacatgacattttgagacaaggaatttccaaagatgcccttgagtttatttgctgttggccatctacctgggcatgtggtctatccttaagaatagtttgcttccctaatgagactcctgtggttatcaattagaggtagcttctatgttagttctgaagtcatgtgtccacttctcccttcagctctagaacccatctggtacagacccttgcatgctgcctcagtctctgtgagtttatatgtgcttcaggcaggccttctgtgtttagaaggccttgtttccttggtattgcctaccctcactgcctcttacagtctttctgtctctgcagagttccttgagctctgaggggagggatttcatggagacatgtcatttaggatcgagtgtctcaaggtctttctttctctgcacattgtccaatcaattgtcttctcttatttatttatttatttatttatttatttatttattgcagggggatattttgctgatgatggctgatcaaggcactgatctatgagtagagcagaatgtcattagaagtcattttattcctatgttcttttagtagaacagtagtagtatttggtttacctaggtccctgcactatctagtctctggttcttggttacctaatcagtgtctagtatgggttccatcttgtggagtgggcattaagtcaaatcagatattggtttgttgctcccacaaattttgtgcttccattgccttagcatatcctataggcaggacgtcattgtagatcaaaggtcttgtggctgggtgtgtttgtttctcctttggtagtatacagagtatcttcctgtaccaaagacattaattagcacataggggtgaagtctctatataggcactagctttatttccccatgttcagtgagttgtgtaagtgttgtcttcatcaacagagccttggtgtcaatttgtggagagaaacctgtaggttggcaacagcctaggttatttggggactcctatgggaccctgtaggggatgctgtagccacgcctgcttaggggctggctataggtgtgccctacaggaccccttttcttaacacttcaactagatgtagcccaatgctagtactggaagcttcatttggtgaccagagatggctagttgggcctctgtctcctgattatttggtgattccatttatattgccttcatatatgtatatactttgagaagtttctattgtgtttgttttccatattacccttcaaatggcccttaattttagctgtctctctcatatgccttccctcatcctgctctccctccccctccccatctgatcatcccattcatgcatctccatctacccataacagtctattctatttacctttctcaatgagatctatgaccccccaccccccaagtcagtggctgcacctgaatctaatgctatttcagccagtaattgtagctctgcagttttaactaaatctctattgttctacttatcaataagactcaggagtcagaggctggggtgaaaatctagctcagagagacagaagagccactagctgaccttccctcttccccagtgtctcagaaagagcatccttctgttctgtgaaaccaaaaaaagactgccacactccaagtccctcctactgcttcctgtgcatctctatccatctcccaaactcctgactctctatgattactttctttcaactagttgttggctctgcctccttactcaagatcaattttatttaattaactcgaactcagggttcacagagtgatcaaatatcctacagcctcttcccccagtcccttattctctacctaactctgtggttctatggtttgcagcttggctatcactgacttaacagattaaatacatatgtaagtgactacataatatattttgtctttctgtgtctaggttacctcacacaggataattctagttaaacctgaaatggccataatttttccttagaacattcttttatgaatcttactaggttttagggctgaatcagcctttgttctcagggagggcaaacccctctgttcaagatatatgaatctcaagatttggtttgttaacagctttgttgtattttttaagagaaaataataatttattgctcacagtaattaaaattgtatatctttctaagtgatttattgtttcttaatatcaaataaaatacaccacttgcttctgttcatggtttcttgaccatttctttatttttaccatacaagacttgtgctacattgagacaatgaagtgtaaagtagtctggtgattaggggcattcctgatgagagggcttaaatattccctaaatgaccttataaacaattgtaccatcattctgactttgttgtccatttgtggagcacagccagagcacatttagtatagtttaaagaaccccaggattttctaaactgtaggtgagtactggctttttgtttaaagtcagcatctacactgaccctaacaagacagcagccattctgggcaagctttgaaacccagaactgacttctccctatcagtaaaaggcttgggattcatcttcttcactactgtgtttacactgggaatctgcaatgtagccaccatcatgttaactagatcgtctacactgctgtggtcctagatgagaccttgaacttacacgttttaaagatggcctcttcccttaaaacttcatggaccaacaccagccagcttcagactttcctcaccttccttggtcactgtagaattaaaacaagttaggggcttattctggactaggctttggttgtgagaatgtggcaggttggaacttctatctttaccagtgttctctctctgtctctctctgtctctgtctctctctgtctctctttgtctctctttctctatccccccccctctcctgtctggttatccctgtgttcactagagtagcacttttaattccctttaagaacttatctttccctttacaatctggctacccatttagttctagctttctgcataccttcctcacattgtgtgtaattgtttctggcttttgatttaaaatgagagagagataagtgatttccattcacttgaacaattcagggccatgtagaacaatgagtggcctaatttcagtattgtgaacacaggtaggaaaggaggaggggggaaaggaagagtcctggtggtgtctggtaagcagaatagtcagagcccacgtgacaccagttgttttgctgtgttaaatatcacagttattggtgttctgaagcatgtatagcaacaacacacaggttaccaatcacattatcacaatagacataataataaaaatttgaaatattaaagcagacagaattttaatagacatttcattgtatctgtactgtaggtttgttggagtattgccactttattgattaccccagtccaaaaacatggggcattttcccatatagttaggtcttcaattttctttctttttctttttcttttttttctttctttttctttttctttttctttctttcttttctttttttttggggggggggtttcaatacaaggtttctctgtgtagctttggagcctatcctggcactcgctctgtagaccaggctgcccctgtgtcccaagtgctgggattaaaggcttgcaccacccatgtccaacaatttttttttaaatttcttcatgtagtttgctcatgtttcccctttcccaactcctcccagcttttacccactcatttttatgccccccaacaaataaacaatcaggaaacaaaaataaaattaacaatagcataaaacaagaaaaaaaacaacaaaaaagccgacaaaaatgaaaatcaaaacaaagaatgccctaataaaaagtctattaaaataccattgagttcattttatgttgagtaagtactcttagcatgggacctgccctggatgtggttgatagagccagtgtaggtgttcagtcttttttagtaatgttttaagttctatgtattggatttacagaagttttgttacatgctttattctttttgtggattgtatgttggtggtatgtgcagttagtttttgcatatagatattatttaaacaagtttttgatgacacttaaaaacttttaaggaggtagacaaccatcaggtgctattttgctgttgtgagttttgatccagaaatgctgttacttaacatggcataagataaatatctgagcttaacattaggaactggggagacagatcaatcagtgaaatgcttgctgtgtaagcttgagtacctgagtttagtcaccagaacacacatgaaaagccagatgcagtgcttgtcattctcagtgttggggaagtagccaggcacatccctgaagtttgctggccagccagcctggcctacagtgcaagctccaaggcagtgaaagactctgtctgaaagaacaaggtcttggtgtctgagaaatgatacttcaggttgatctctggcctgtacacacatgtacacacaagcatacacacatacaatagataaatatttgagctttaagtctagttttcagtttttaagcctttaatcaatacatcagccacagcttctcttaccacaaagagatcttaagtagtaaaaatcagtatttaattttcccttcctctttcagtgttaaatgtttgcaaaagacagtgaaggactcttaccacattatgtgtaggccatgtgcctgtgaacttgaagtttgtgcaaaatgtgggaagaaagaagacatcattattccgtgagtatttccttctattttggggtttgtttttagtaattcatctatgagctttctcttaggcagcactgttacgataaatctttccaccataagccaccgagccccgccgccacatgtgtgctctacccagccgcccgcccgagttaggcccaaatgaatacacagaaattgtattaggttcaaagctgcttggccaatgactaggattcctcatctgttagctcagtcttaattatcataaatctatatattttataagacttatcttatcggatgccttattggcgtccctccttgttggtggatcacattgtgccgttggagcaggagtggaggggaaaaagaggcccttcctgtttctccttcacttaaatatgagtctccttgctatgtcacttcctgcctggatcagcacttctctactacatttcccagaatcctctttgactcctagtctcgtctaacttgctgtctcattggccaaacagtattttatttaacaatcgataagataaacatacacagaagtacttaccccatcacagcactaactcagtttaaacttgtatatctctcactaatacaagcattttttctacatgacaggaaaagggtcacatttttactaaatttttctattagagtataaaatgacatttgtgtttgggaacatcaactctttagcttcatattcattatgaagaatgacttatttcatagcagtcttccttcgtggactccgtttactaaccctgagcccactcctcccacagcagtgttagaatctgctggcttgagtgaatctagtcttaaaagaggttctctgttttgttctgtaggtgcctgataggaagaaactagtaaaggctttttaaacctctaccactaaatagtgaaagcctaggtaataattataaacttttcttctttttcttctgtttaggtttaataaagaacctgaaacttcagtaaatactgaaaatcaaggttctaaccgcagaagaagctgcagagggaaggaggacagtgatgaggatctagatgctggcactgactcggatgacgacgatggagactcttaggtgacctgtcagcacagactcagctgcagagggctcagtgaacacactgatgtcctaatgaggcagtcagaaaaggctcttcaaaatagggagaactgacacatgagcattataagttttttttataacttttgaacaacagaaactttcaggttttcacaataaaacttaagctgcttatacagagtatgtgtggaagcttactgtggcatgttgtacaatctatggaaattatttagaaaaacatactatctattgtcacagttgagaattagtgattgtatcagaacttgaaaaattaagatgattagctcacagcgagtacatttccatagcctgactcaagtgtgcgacttccttaacaaaactttcttatatcttataaagcaaaaccatttatttttacacacacacacacatacacacacacacacacacacacacacacacacagacacacacacgtagtgattttctttcagaaatacttttatatatgtcattccattgtttttaccttttcccagtttagaaatacatactcagaaaaatgtgtgcactatataattaataactagaaaggaaaatccaacattcatacttgagtagagatacttgcagtatcagaagctcctgtgatacaggcacacctgtaaccagcccccagcaggcatgtttagggtgtcccctacattctcccttataagcttatccttcccagaattccattgttctgaattatcacttttctgccagggtttcaacttgtaggcagtataaattagctttgtgtgattaccgaagtatgtgtccttatgtttaaaatcatatagctacagaaaagtagctaggtaatgcaatgaactttccactctctgtacttagattccttttgtttttgtttttgtttttcgagacagggtttctctgtgtagttttggagtctatcctggcactctttctgtagaataggctggccttgaactcaaagagatctgcctgcctctgcctcccaagtgctgggattaaaggggtatgccaccaacactcggctgtacttagattcctaatttccgtattttactatattttctttgtgccttaatctctatgtgtaatatatatatatatatatatataatatatatatatatgtatgtatgtatgtgtgtatgtatgtattatatgacgtatatgtacatgtatatatgtatgtatatattttctgaaccattgaaataaacgtgaagccttacttttggacttgtggctcttttgttgttataaaaatttggaaattgacacgtgttcttgtagaagctgtgatttgttcatctgacattattgtgcattgttctaatgttgaaaggcatttttgcatttgactgattttcctgatacacacaatgcccatgtaaagtgaagcgggattagaaattttattgaagatattttaatttaggcttaaactcaaagcttaagagatactgactcagagaaaagtaagactcaagagtatgagcgtggacctctcaaaaaaaaaagaaagctactctttttaagtagggtgtagccaagtgtgcatatgggcttttcaagggagagggagtaggtatgtgtcttggcattagctatatatatgtactcatgggttgcatatcaagtttcctaagtgtattactttcagttgctatgataaaataccatggcctaagcaacttatagaagagtttatttggatttatagtctcagggaggtgagagtccgtcctggtgggaggcatggcaacaggcagacatggcagctggaacaggaagctgaaagcaaactggaaatggagcgagctttaaactcacatagcctgcctctagtgacacatttcttccaacaagaacacaccctccaaacttccccaagtgcctccaactggggaccaagggttgaaatgtctgagtctatgtactcattcaaatcactacagtaaagcaaaaaaaatctttttttcctctttctgctctcttttggtgaggtgactctgccatgaatagaatcataatctgatcatgtaaaagaaaaatctactccataaagggataagtatatgcccttcctgtatagtttctgctgaaactagaaaatgccaggtttgtgattgggaaggacaaaggccttaaacagttgttgattgtgctggaatccttgctttgctgctgtcaaaggcttcagctagattccagggcacttgtaaaataaataaatattatctcaaaagctactgccaatcaaaaatccagttatgtgcagccagaagcattcctagctgttacagcaacagttttacaacacctatcctatagcatttgccagctgtggcagcaagaaataaattaatgtattaagtatgattgattggcagtgaaagcttgtcaatctgactgcttgttatcattctacaaaagaattatagattaaatagctactaatcatagcaatagattctaggcatttgtatatattaacacatttaattaaaattgcccttgtagtgatgaactgttaataaacagaatggacagtaagcaatactctatgagacaaaataaagcttgggggagtagcagggtcagaagtcagagcccagtgggctagaggtgagatgctcaagtaggtgaggaatgagaaattatttttaaagcttctcattgcaaagaggggtaggaaacatgagaagaatgtttgtgttggtttgaaagaaaatggcccctaaagggaggagcactattaagaggtgtgacttttttggagtagatacagcattgttggaggacgtgtcactgtggagtcaggctttgggttctcatatatgctcaagccattcccagtgtctcagaccacttcctgttgcctgtgtgaagatgcagaactctcagctacttctccagcaccatatctgcctgcataccaccatgttgcaccatgatgttaatggactgaacctctgaaaatgtagaacaccccaattaaatatttttctttgtcatggtcttggtgtttcctcacagcaatagaaatcctacctaagacaatgtttcaggcaggaaaaacattgggaagccttgagaggaagacttgttggtctgttcaaggtgctgcaaggaagaactagttaccttagagcccttaagggatgataccagtgagtgacagaaggtcagaacctgctgaccatagtggcacactctgataccagcaatgaagtggtggcagaaagatcaggagttagcctctgctacatggcaagtttgagtctaacctgggctacgtaagacttatctcacaaaacgaccttttttttttttttttttttttctattttgtttcagccctttaactgatttcaccaccgtgaatgtactttgttctatgtgaaattttctgagcccctgaaatctgatggtatctttaacatgagactcagaaaactgccatccattatttctgcaaatagtgtctctgttccttttctgaaagtgtaatgctgcacacgagtggatccttcgggccatatgctctggctcccttgctggttttatttgcctcttcctttgtacttcagcagctgtttcctgtttgctgttttttgcattcacgagtcttctagagaagggtaaattaatgtattcaacgtgcttttaaaccttggcaaatcactaatctcaaggcagtgaatgtacaattctaaaatgcctgattttttagtagattacaactattgaaatttctatcgtgcctattttatgcaggtttttctgttttctgtgatgcaataatagttgattgctgtctgttgtagttaggatatggcatgagcctcctggattatatactggaagcattggccctagtgttgtggccttgaagtgggagacactcctaagaagaggggctcagcataagctaattaggtcatgaaagaaccacccttgcaaggaattgagtgagttcttgccagaagggactcaaaagaagccatttaccatggtctttgaccctttcattaccagaattgtgagccagataaatgttactattttataaagtactttacgttacagcaacacaaaatacaccaacagaatcattgctgctcacttttttctgacctgcttcatcctttgattatcagtcacctttcaaactctgcattattgaatgattttaattttgtcttagaaaccatgggtgagagctgggcgttggtggcacacacctttaatcccagcactcgggaggcagaggcaggcggatctctgtgagtttggggccagcctggtctccagagcggtgccaggataggctccaaagctacacagagaaaccctgtctcaaaaaacaaacaaaaaaaaaaaaaaacaaaaaaacaaaaaaaaaaagaaagaactcatgggtgatatattattttttaatgttgctttattttcaggtgctgtgtcatagtaataagaaaaataagtatcatacaattgggaaagtgtcagtaatttcacaaacaaacaataagctttagcttcagagtttgagcttgcttggccatctgactccagaaccatgcatgtaaattactagggttagagcctgtgaaataccatacattactgattagacaagcctgttatttccctcactagtactctagggctcttgtatgagcttcttgaccattctcccctcttcctcattttggacaattgtaactttttttctaaagatcccgcttgagtcccaggctactggatagcatgtaggtgcttagctgtaactgatgaccatttagcacagtgatgactatcaggaggaaatgagagttattacaggcatgtacgaaggagttgtgtgtgtgtatgtgtgtgtgtgtgtgtgtgtgtgtgtgtgtgtgtgtgtgtgtgtgtgtgtgtgtgctgtgtagctggcacctatactaccgtttaaaaataatataaaatgaataaatggcagtttctaatgagtgccctgttttcatgctacctgcagagtggtcaaagaaaaagataagataccagggacatagagatataaatggggtctgtatctctaaagcctgtatttcagttgtgcttatgagaagtaattattgcactcttagaaacttgttttcctaattaaatgtatatgtgacattagcacagctctctctttgtcctctgtggctctccctttttcttcatcacattgtttcttttctgtcttggatgactgtcctattcaaaagccattcaaatagaacagagataccctcttctctcatcttgccttggaatttctatcgctcatttggttaattgtcagtagtccggaaaatcacaggaccattttccacaaattctcattggtcaggctcatcccagtgattcccacaattctgtcaaccatcacatatacaggaaagcattcgcctccccccaaaaatctcacacatacatctcttaaagaatccaaacgaacaccacaattacacaggtgcttgcatcttttacttctgtgcactattgtttggatggaatcatctcttactgaagctggtgttgaaatgtggctggtgttgtagctatgttgaggtgtaaggctttaaagagagctgataatatccagtgaggctggactgtttctcctgaggacatatcagttctcgtgggaatgtatcatcatgtgtctgggcctctgttgtcccctcttgtcttcatgtatctgtctgcctgaagccacatgattgattggcagtaccacattttctgccatggcgcccttgtcagagaccaaacagcacaaagtgtccatcattcacttctgacggtgcccaattgcttcaaacctctttgtgataggaattccctgccatgatgtttatcctggaactatgagctgaataaaccctttcttccttgagttgtttttgtattttatcactataacaagaaaatcaaacaaacaaaaccaactaatacagatgacttctggctatagtctacaaaagttaaagtagaaggactgagcccagaggccagagcatgcctgtctcaaacaacaacaacaacaacaaaaacaaaacaaacaaacaaaaaaacttaactttgacaggagccaaccgggggacaccagtatttcatcaaatcctagttacaataccagtatcaattttaagtacataaattaaagttttaatattaagttgtacattaaataatttaaatgctactttaaaatcaacttttccatttaaatttttttcaaatatccttggaattaacattaagttaaaataaaatttcgtcttgttcactgatcacttcacagacacagtgggtgaaggaaaccagacacaagagatgcatctcgattcaggtgtttgcacaggtacagaagtacaatacttgacacttgtgattcgactttattgtatgtaaaggtcacttcaattgaaagtaatattacaaaataaggtatacttctgtcaaatccaggccttggacagatggcatagctcttaaggaagagcaagcaacaaagtgattctgagggagaaagaactgtttgaagctgggcagtggtggtgcacacctttaatcccagcactagggaggcagaggcagactgatatcaagtgagttccaggccagccaggtctacaaatcgagttccaggataccaggactgttacacagagaaaccctgtctcgaaaaaccaaaaagagaagaaaaaaaagaactgtttgaatcctgcccctgcctctgaccattgtggccctgagcccctctcctctgtgacagttcctgtccatccctttgtctaacaagtatgtgattgccactgtaaacgtaaagtgaatataaacacaggaaatgcctgatatataacagctgcttttgtcaagaaattcatcttgtagctgttttcaatcttttaaatttacataaaatttgtttttaagttgactaataaaaacaaaaatgtaaatatttgtggaatattgtgtgatgttttgataaatgtatgctttgtgtaatgtgtaaatcaggttaaacatctcaaacatttggcatttttttttaatcatgaaaacactgaatatctagctttttgaaatacgcagtaattatctctctccatgggcaccctccatagcccaccttccccctcctatgaagctgtaacttagaacccaccagtccacctttcctcatgcgtcttacacctacctgttcttcccagcatccagagaccttggcttccataccatcaactttaaaaattcatttatttatttttggcatgtgcatgtcttacataagttttctattgctatgatcaaacaccatgaccaaagcaacaggaaagaaagggtttatctggcttacgtttccacagcactgttcaacacaggaactcaggccagtaacctggaggtaggagctgatacagaggccacggaggactgctgcttactgacttgctccccatggtttgctcagcctgctttcttatagaatctagagccatcagtccagggatggcaccacccacaatgggctgggcccttcccccatcactaattaggaaaatgctctacaggcttgtgcacagcctgatcttatggattcattttcttaattgaggttccctcctctcaaatgactctagtttatgtcaagttgatgcccaactagccagtacaatgcatgtctccatgcttttatgcgtgctacagagagtgaatggaggtcaggagacaactcaaaacagttatttccttccctcatgtgtgttcagggaattgaactcacatcttcccacttggtggcaagtgcctttacccattgagccaataacagctttttgtattctacagaggaaatgttcctttgtcatttttgccgtagacattttatttcgatttattctaagaggcttgtgggcctgcaaagaatatctaccaatattcttggaaaaaagaaagaaacaagcttgacatgaatccctctccactaaaggaggaagcagacaccaccagtgaaaatgcttcaaccagaagagttaggcttgccttaagctatttttaatacttgtgagaagtgaacccttcaataacaggatttgcaaatttggtgcagcagcaagttctagaaagtatgtttccagcagtaataatgttacaatttatcttggtttctttgtcaaactggaacctatttctataacactaattgttatcacatgcacatacacaggaagctgaataaatcaattgatggaggggtttatttttaaaataacagttaactaagaatgcaaagtgaattgaaaaagacatagtcctttacaatgaactctcatttcaaacatacattggcctattgaagtaacaaatgtttgcacagttgtgggtgatcttatccaatccacaatttatttttcttgactaatcataaatctatttgttgagtatattttagttaacctgttgttttttatttcacaattatcaagaaaaatcatggtaacataggacaattattctcaatgatacaggaaatgaatcagccctttggaactaccaggatttgatgttagacactctgaagaacagccctgaaatccctcagcccagaatgttaccctgtgtttgcaaagtcaggaaacataaagtggaatagcttgtttatatttttactttttatgtgtatatgaatttttttctgaacatatgtctttgtgccacactcatgcttggtgcccaaggagaccataagagggtattaaatcccctaggacttgagttacagggtgctgagacttgaactacagacctctggaagagtagctagttctcttaaccattgagccatttcttcagcccacatgaaacagagtttttaactataatttccattcagtatgttttttggtgatatactctgacaataggtcttattgttcctctggagggaaaaatttagtattctgtgccactctcagaaagtctggaaacagtgagaagagggaatttattttatttcacccaagaacatactgggcaaactatgtggaagtgtaagagctgttccacagttaaaaactaagattcacccatttcttcccttcccaggactatggttgccagctgtcatgaggcaggtgcagtgtgagcagctgccagtggacagaaacaacaacttgctgaaactggcaagtgtttcctgtatacaatttagggaagggtttggaattcatttcttggcagtagacaaggacatttcaggtcctgtcaagtaactgatttatatgcgggaaggcctcagttggagggctggacattctcgatgccagttcctgcctggaaatcatggagaaaaccctacaaaaataaaagtcctgtagcaaggaagcctttgtttgaggtagcctatcttcaggggatgatgaacatgtcatgaaagacctgctttgtcgacctgtagtgataccaccaagtattactgcagtggacccttgtggacaagacagagatcaaaaagaaacccataaatgttcaataatgtgttccgataggcattctactggtcaacctttctatatttgtccagttgtgaagtttcccttgttctgtggtcatattagtttgcccattcactggatgttctgcaggccacaaagggaacaaccttctccccttaagctgcagagaggactgaacacatcatggaattgaactgagtccttttgccctcccgtgttcaatattgtatcaaggaggcaaatagtcttaggggagtttcagctgaggacaaccatcctttcagcatctccactgagatcacagagctgaagaccccatgtgtgaaactcatatggtcagtagcctgactaaatgtgtcttagatatctagtgtgtgtatatgtgatagttgtaattcattaaatgcaaattcaattaacattatttccctgagtttaccttaagttctatgttttcttaatttatacttaaagtccaattcagctattgaaggctacaactgctttccctttcaaaaggtatttaggagccttggaatagttgagaaccacaggtaaaaatattgttcttcattattctgtaaattctataaactgctgcaaaagctttttccataatggagtaataattctgtctacattaaatttttttgaggtacaatttatacaacataaatttacctatttttaaaaagtatataatctactgatgtggtaaatttacaatgctgtgtaattatcacacaatccagctttagaacatcaccccatatagtcagtcccatttcctaactccagccccaaggaactaatcattgttctgtgtctatacatttttttatgattttttctatgaattttgtcttacaaagggctaaaccaaatagtgcttgccatccatgcattgctcttttgaggaaacagttgatttgagtgattggactttctaacatctttctttagtagtcccttagctgctgactcctgagaacaactgatactcaggctgggaggtggtgaacatccagagatctgcccatactctgtagaggtctctgaagtcccccaaacaatacgagtaattaaaactgctgttgatggcccacaagaactagatggtaagtccctactactgatggtaatatagtctttattataggacatggagaaatacagctgggatgaactgtaagcttctccctcctggctagctttcatggcagcagaagatactgttcaaactgctggaggaaaataccatcagctgttctacctagtttgggggagggggtgctgcttgctctatcaccaatatgctaggctaggtgtacccaccaatgcaccagtgacatgattgttacaaaaacaacaactactttcctactagatttgaggctcatgttacaagagggaattcacatttggtattgtaagtgtctagtcaaaagaccatagctagtgaagtcataggacctagcagggaagctactgttgctgctctgctaaatggacgtgatgtgtccacccattgccttctaagaatttatatttacacctatacattgctgctaatgtcagcctttgtcagaggaaagactctttttgcagtgaagagtagttactatagagacatatttagtcaaacaggtgactgtggctgcagtccagggttcaaccacaaatggaggaaaatagccatacatccaaggctaaggaaacaccatgcaagagggggctgaaaggatgggagagcagcagaacgtaattatggaaccctggcctccaagcataacagctaccactacgttaatcagggcagctacggttgctgtaagccacccttgcaattgggccaatagacatcacctcctaagaagggggtcaggagacaggaagtgctagagcagttctcaaccttcctaatgctgtgaccctttaatacagttcctcatgctgtggtgaaccccaaccataaaattattttcattgctacttcataactataattgtgctgctgttctgaatcttaatataaatctctgttttctaatcatcttagatgagccctatggaaggatcatttgaactcccaaatggatcatgactcacaggttgacaacctctgtgctagagtatatagcaggtagaagtttatttgggaggatgggtgatacggagagattccagatatgaagccatgaggatgtgtttctcccctgagatgagaccttttgtttgatatgactatttgggggtcatccatgttctttaagtaattgtttacaagtagtcctggaagtaaacccaataaattcatcgattcaccaagctagtgttggatggaatctgtgctctatctactagaaataggtttgtttacatctcctcaggaaaagttcaacagggtcccccccatgaagaggttccacgttctcatcttcagttgtaaatgccagtgcatttttattattgccattctggtgggtttgtgaaatatcactgtggttttaatttgtatatttctaaggacttgttgactcagcatatttacaagtgattaagtcagacatgtatctatcttctttggtatatgtgttcagacttgttgtccacttataaaatttggtttattactattgctattattattattattattattattattattattattattggttttttgagacagggtttctctgtgtagctttggagcctatcctggcattcactttggagaccaggctggcctcgaacttacagagatccgcctgcctctgcctcccgagtgctgggattaaaggcgtgcgccaccaacacccggcttattattattattttatatggattgtttgcatatatcctagataggtccttatcagatgtgacttggaaattgtttcctctagtcagtgacttattatttaatagctaagaaatcctttacaggagaagtaatcatgtggtcagtgatagaatttgagtcctaaagcttgcagactacccactgcatatctttgtaacatactatggcttgtgaaaatattagagcaaccagttttgattgtttaaagtgtttagaattggaaaacagagagaccatgtaattgagcacactatctcaaaaaaaatgtatttgtatgctggttacgttttctttttctactgtcatctatatattgtgggtatgtccatcatgaccagtaaagaaagggaatgactctctgtggtaaggtgaagagatgactttaatgatctgttagttaagtttgactggcacctgttgaagctatgtatacacatctgtgtggatgtaggtaactgaaaatgcttagaaggagtgacccaactaaagacaatgagacaaagacagtaattgcacctacttcaaatatagaagctctagacagcaatcaagacaaaatttgaattctgacagtagcctaagacaatggttgtgtggccagcatagtgccagggcttgtttgggttcattttagacccctttttgtgtgtgttcccctacattgctgttgtcatcaatgaacttgatttcgttttgttcagtagtcaggagtccataagtctttccttgggtcaatcaaaactgcaggttttaattttgtttctgtagaaatagattttaagatacatgtgaatgctcacacctgctctagatatgcagtttcatttctcttctctatttttgtgtgatagaatcagttcctgctttaatcttaagctaaaaatgttttccatactactcaaaagaatagacattataaaaattctgtcattaaacaagaccctccaaaagaaaaaagcaaaacaaaacatgtgacaacttaatgaggttaaagattactcattaaacacccaatattgccagaggtcctcacacctggatctacaggagactcacctatggtgtgagtataaattaccagcttccccagtcccctaagcaaaactacaccaccacggaaatcatgccaatgaagttccaggagccatgacggcaggtttcagtggctctgaaagacatccctgctgccagtgcactgtgtcccgtggctggcttacacccaacccaacagtgtgtcaccgcagactcttaggcacagcactgtctaaatatcagggtggcaatagggcatctacttttagtgaaatcctaccttaaggagcaaatgagagtgatattgaaagtccaaaggaaacaacagagtaaatctgatggtataagagagcttgggagtaacataacaattaaccaatgtatttcctctcctagtgagtgtgtctgcaggttgtagaaactaagtctttaaaaggcggttaatggagacaaaggggtccaagaaggcctatgtgccccttcccgagcatggattagaattcaggtgtggtatcagcttctacatcctctggatgcttatgtttttgcaagtaggtttatggagaagagttattctatccactgttcagtccagctgactagaatggttcagacctgagaaggggagtgaggtttgagaaaaaacaggatagagacaggtcaggagggcatccagtcaatactgagatccaccttaaatttgttgctcaaagttcttatgtacccctaccaaaaggggggggggacaaaaggacttccttaccaatggtacaaggaacaaacagatataattgcttccttaattctcaaagcatgtagtaaccacaccttagatcaaacctcctccagttatctggtcttgagggtcaggacatttagtgaccacatcttagataggatattctgttatctaggcaagacatccaatggccaaacattagactaaacatccttcagtagctacaccttgaacctttaggtcttaggcctttaaccttgaaagagcaaggataggtttgaaatctgaccttaagtcaatatggaacagagcccagacaacccaccccttcaaacctttgaattttgtttcagaaatgtagtctcttaatcatagtcccagatagcctgactttcatcaatatctgtgacactatcaggtgagaggaaagattgtgaggcttctgttagagtggtaattttgttggtaacttcctctgtgactccaataaatcccctatgctgtcagaattgaagttctttcctgtacaaaatttctagagatggctgtctctatgcctcttctgctatggttcctgtagcagcatcagcctgatggaaaatttgttaaacatgcagattcttggattctgcctccagtctactgaagcccactctaggagtggggacaatccgcctgcagttgaaggagccttgtaggtgatcctgctgttacagctaaaggttaagaatactagcctagggctgggcgttggtggtgcacaactttaatccccgaactcaggaggcagaggcaggcggatctctgtgagtttgaggccagcctggtctacagagtgagtgccaggatagactccagagctacacaaagaaaccctgtctcaaacaacaacaacaacaacaaagaatgctagcctagttagtagttcttagcctttgctgaatgtctttggatgacttacctaactatcagtcttagaccaaagactaattgaaatggcctcaagttgggtatagtcattgctgtagccgaaggctcccaaagctcagtcagtgttggactgtgacagcacacttccagacctgtattctgcagacaccactaggtgttgctataatagagacaaaaaggcatttcaaggagatacacagagaagaggaatatctttgataagaggatattctgtgatttatatctgagtgcaatttgaaaagtgttcacttttagtttgttacattttattcaaataaatttaaatgataaaaggaataaatgttgacatatgaatacagtaaacaaccagtcattataacaaataaactgctaccaaaaatatggctgagtctcacaatagactgaggaactgcaagtctgaacataggctattggtgtcggtggtagaatgtttgcttagcatactttgatccctagccccacaggagaaaaaaaaatgaaaaaaaaaaggtgcacatatatgatatagttgctttcaaaagaaaataaaaaaacgggtaaagctaacccatggtaatgaaggcaatatacagctaatgattagaagataacaccagggaaccccttcaaaatgttccatttttcctggtgatataaaaatatgcatctgcatatatacaaggcacatactcactaatttattctctcacatttgaataccttggggctggagagatggctcagtggtcaagagtacacgctattctttcagaggactcaggatgagtcccagcacccacaccgtgcctcacaaccttctggaactccagttataaaggatctgatattctctctggcctctgagggcatcagacacacttatacacaggcatacatgcaggcaaacaattatacacatataaaaatattaatctttaagaaactgaccaaatttttgaatactttgctctatttatgtttctcttccttaataactatagaagtagaaatgtagccctcaggggggataattgtctcagtggccctctcctacttggtagatgattatcttatgtataacacctatgtcactaagaaatgaacacagcactttaatttcatattaatttaaagcatatgtgttaatgcctttggtcccaaagtgagaataatgaggtgttttgttttgggtagtatagaggagcatcccagggtcctcctgaacacaaggcaagcaccccatcactaagccacatataccctcagcactgtggtctctatcaaagctttggtttattttgaatatttgcctgtgtacaaggcccgattgctgcagcaattcattcaagagaccgaattaacatagcaaccctctgctatctcttccttgctcctccgatcttgtaattaatctaaggaatgaaactgtctgctctattttatctgcaggggaagacctcgtccttctactgtcagtggcaggaggtcaaatgcatcccatcacagtgagtgagataagaggaatccgtgtatagcagaggaatccggaaaattgtgccaagctactgaccgtcaaaataaaggcttatgtgaagggcatagaagaaggagaaggagaaggagagaaggaggaggaagaggaagtgttaaggaaaggaaaaccagaatcgcacaacagaatgcagaaagctcttggaaagaatcctgatcagaagagataggagatggctcagctatggcttccaagccacagactggggtggggatgggggttgattttagggaacgcatcttaagaacatcaaaagcagggggagatgtctgaggcagacctagaaaagcttttgaggacagccaaagtctttgatcaactgcaagtatattaaatgctgtcagttttaccctatccagtccctttgtgccattgtgtcccaataactttgatgtcattctgtaggaactgaatagaatatataggacagtggtggtttatttcagatattctttaattacattttgtagctatctctatggacatgttgcagaataatgctgaacgtaaaaggaacttcatcccctcagtcacagaagtctgtccctgatgctctaggaggatccatagaaaaataaaacagtctgtcctccctcagagtttacagttagctgggaagggtgcatgaggtgttcggttacttgttacctaggaaacctctgctcttgtagcctgagccgctgtgctttctctggagtccatgtcatctctgcctcaggactcactgacacctccattcttcctgctccttgctttactgctgcaggagcagcacaggtaccaacatcaattcccagtgctcataacagtcacacattgggagtgattcctttccatcaagatggaatggaattaaataaaagagaatttaaataaaagcagcaagctctttgagggttaggatgtgaaccttagttatgtgtcatgtgccaagcctcaggtttaaatcttcagaatggaaaacaaaagctctgcatgctgatgtgaaatcactcttctagatcttctcctagacgaaagctacaaacacatcttccatttgtttctctgcactagcactacctgctgtgcacccaggagctgtcctaaatgcttataccaatggatgccattgcccttttggcttttatttggctatagtcaatgggattcctgcaagcagcatcccctccctaagttcttgggtggtgtactggctggttttgtgtggtagcttgatgtaagatagagtaatcagagagagaggagccttagttgagaaaatgcccccatgagatactgctttaaagacattttctccaccagtgatcaatgtgggagggcccagcccacagtgggtggttccatccctgggctggtagttctggtctctataggaaagtaggctgaacaagcctctctatggccttcgttcgtatcagctcctgcctccagggtcctgacttccttccacaattgactccaatgtggaactgtaagtcaaataaacccttccttccccaacttgctttttggctgtggtgttttgtcagaacaatagaatccctaactaagacaggtggtttaatggccctcactacagagacttctctatcttccatctctgggaaagctttgctattgctccctcgggtctcgtgggaggaatggcattaggctgttattgcatactgctcttatgtactatgctttgtggattgctagcattctattcagatccttctaaatatgcctttattttctttagactgttcagttggagtgtgacatttgtttctttctggatcttcaccgacatagaactcacttccataaacggctttaggagaaagatattcagcattgaactctgggtttggatggccatgtatttgaaaaacatagaacttagaggtaagtcatttgggtacacacaatgcttgaaatatggcaccatcatgacttaaaatgttctgtgtgcatgatatggaagatagaagcccacatgatatcaaaggacaaaattgtgacactgtgcctgatgatcatgacagttgtacggctcatgacactacctggttccttagatagtcttagttaatggagagaaaaggagtgagctcttggtttctagttgggactgtaagtagaatcagaaaacctgactgaagggtgagggctcttcctacagtcacaggtggatgacaagtatgaggaaaaactggatctctggtgtgtcactgctcacgagactgcaaacgaaaacagccactctgagagaacacttggtcagtgtttgtaaagaaataacacacttgtcatgacttacaggcttattgctgggctcttctccatcaaatgaaattttatgtctacctaaaaagctgtatataaatagacttagaaattttgttaatagtatctactatatacaaagcaagccacattcccatggctatggtaacatgtaaaataccactcactaaccaaaaggtttggctggagatggttggtacatgctgcaacttagatagtataagggcattgcactgagtcaaggagtggggaagcagtcatagaaggccacatattgcgttattccattgatttaacatttccaagtgaaatcaatgggtcctagccaagggttacatggtgaaggaaaggataggtgtgactgcaaaagggacagcacaaaggaggtctttgtggtaagtcttatactcattgtattgtgatttggagctattgtcgaatggccacacacacacacacacacacacacacacacacacacacacacacacacacacggagagagagagagagagagagagagagagagacagagagagagagagacagagacagagagagagagacagagagagagacagagagagacagagagagagagacagagaggacagagtgtcgatttccttatcttgatattacactacacgcagttacctaagaagtgttcatcacacaagactggttgaaggctacaggatcccagtctgtatgattttaaatttatgttttccgacttcctgtgattctgatcattttaaatggataataatggatacatgtgtcagatattttggatatgcaatagattcacaagatttagaagctgaaatgtataaggcagtatactttgaaaataatttcagttgtagccagaaaatctgtcagcttaatgtgtgcatggtcagggaccaccccacagaaagtagatggtaagttctggaggagggtctaggcagagtgtaatggggactgttggtcacaagggttgtgaatggctgggggtggggtggggacagctgagcatgctagagcctgcaagagcagcactgtgggaaatgcacagttgctgggggaggtgcaaaaggaagaagcagttgtggaagctaagaagttgcaggaacatttggccgataaggagaaacatggccattgccaacctacggagagaggggaagggctgcgaaataaatgcttgacattcccctgccctctgtctcccagttgtcacaatcagagaaaagtgagaagacctctccatactgtcaccttccactggtcagtggggagcagtgtgttccccaaacagctggctctcatcctaacagtcccctccctgggaatacaagggagcacagttctttttgtttgcttgcctctgttttttgaaacagggtttccctacttaaactcagggtggtttcaagctgtcttctcatacctcatgcttcctgagtactcaaattacaggagtttgtcccacattacctcagaattctccttctttacattgtttcattttatgtgtatgagtgtttttacttgcatggatataagcacaccatgtgtgtgcctggtgctcctggagattagaagacttattcgagcatggagccagggtcctctataagagcaataagtgctcttaactgctgggcccatctctctatcccctcattctttaggttgttatcttcaagtccttcttctatttttttgttgttgttcatcttttcttgaagtttgcatgctaataacactgctttatctacgttgcaaatgttgtaatgagttatttggtagattgctgtgtatttttgagtaaacagagcaacacatagcaagaggagaaacaaattctggaatttgtcatcttactaggattgcaatctccctggggattttgtagccaagatgctgcaagctatgaatcttgttaaagggtcctaacatcttactctgacgggccttagcctggtctagcaggtggatgattgacagggactgtaagcaagacttacctgctcatcccacttctttgaatttttattgtccttggaatagaatgcagactccacaccactgccctctgggccacgtgatctgtggtctaccttcccaacttgtctgatgagccccttcttttacttgttgtatatacaccagccttcctctcaaacactaacttcatccctgctttaggatgctcccagcaatgctggtccccagatctttgcttacccagcagcagctgctgcttttccttctcttccttcactgctgaagaaagtctaccatttattagtgctgatgttcgatatactgaacagagagaatgtgcacatccactcttgtttaacaaagcaaagcaaagcaatttatgtatcaaacttagtattgtaatgaaagaaaagtgtgtttgttaatcatgaggacagatgatgaagtggcttggaaataaagcttggatgcaagtctaataattttcacagaataaaaatatgaaaaattagaaatattaattattaatgacacagctgtggaaattttgagatatatatctgtttcttccttcctatcattgcaccacacccagaattcctactggcatcctgtttgcggatgcagttttactggagtcctcactgtacagagatgaggtcaggaccagcaaagcaagcatcactggggcatcccccttacccccctgggaatatccacattttcaaaacaaactggcaactgaattttgaaacttgtttcataagtacaagtaaagctgacaaaaatgaacaactgcaggaaagctgttggataaacagcatctaaaatgatttcatctctaatgacagagatgacttcagctcactgctacctgaacagtaatatttgtgagatgctctacagaggcctgcaagcatcacacttctgtaatagactacaattccagactaactcagacttagacaaataagatatgctttttctcgtttgtggttcctagattttatttaggtacataagaccatgtctgtatatatgacatgatggtaaaaataaaactgtctgggcagacaaagagaatttgggaggggggttgaaaaagggaagataggtacatgggtaggaatgtgttcaacatgtacccttctgtgaaactgtccttacgaaacacagtaccttgtacaatagatatattcaatgagattttttggaaggcacaccagagcccactgatcccatcagtgctgtgagcttgtgattaggttttaagatttttaaaaaagatttatttaagccgggctgtggtggcacacgcctttaatcccagcactcggtaggcaggaggcgatctggcaggaggcgatctctgtgagtttgagaccagcctggtctagtctataagagctagttccaggacagtctccaaagccacagagaaaccctgtctcgaaaaacaaaaaacaaaaaacaaacaaacaaaaaaacaaaacaaaaaaagatttatttattatgtatacagcgttctgcctgcatatatgcttgcacaccagaagagggcacaagatcttaatatagatggttgtgagccaccaggttgttgctggggattgaactcaggacctctagaagaacagccattagcctctgagacattactccagccccaggttttactttttttttttttaagatttatttttattttatgtgtgtgggtgttttgcctgcatctgtatctgaagagatggttcagtgggtgatgctctagctggaccagcatgcagaccagagttcagatccccagcgctcatggaaatgccatcctggcatggtgggcttcctataaccttagagtgtgagaggtatcctcacagcaagctggataagtagactagccaaagaagcaggctccaggttcaagtaacatatcctgcctcaatatataagatggagagcaatgcttcaactgtgggcttacatatgtacatgtatactcacacgcatgagcttacatgcttgcacatgtacgagcacacacatgaatactatacactttagcgtgcacaacatatatatatgcaaaaagataaaaaagaatagtttattctgcattatagctctttcttctgtgctcctgggtgtgtacatgtgtgcatgcacacacacatgctcttcttgaagccttccagcatatctggctgtcactgatttttaacaaacacaaccttcaaggaagggaaaataacaggattgagaatatatataaaaaaaaattggacatgtttttgagctaagcatgaaatttatgagtgccattttcctttcagattcttatgttattgtgtggtgatttgagtgaaaatggctcccaaaaggagtggcactattaggagatgaggctttgttggcctgggtatggccttatgagaggaagtgtgtcactgtgggggaagacattggggtttcttatgcccaggatactgtccagtgagtcagtggacttcctgttgcctctaagtcaagatgtagggctctcagctccagcatcacttctgctgccatgctccccaccatgatgataagggactgaacctctgcaactgttagaaagccagtaagcagcttccctccatgacctcttcatgagctactgcctcccaggatcctgccctgtttgggttcctgtcctgactcccttcagtaatgaacaacaatgctgaagtgtaaaccaaatatactctttcctccccaacttgccttttggccatggtgtttcattgcagtaacagaaaaaaatccaaactaagacatactgtctttgtagaaaagaaaatctaagcacccttaatctttttataataacagtttgttttccataagggaatgtaaatttggcacacccagccatagaaactatttctgtctttagttttccaaagaccaacattttgttcctgaggcttttaagggctagtctcttctcaccatgtgatcacagatctgaccctgaccctccctttctgatcttcagacttcccatgtcaatcaaaccagttctcctctctagacatgaaaaactagtgagttttttcacccataaactgtcagtttgatagctcttaagtccttcatttcacttctgccaagcaagatactagctccttaacatatttttaacagtaattttcatttttttgtgtgtgtatgggtatcttgtctgcatggatatctgtgtaccacatgtgtgcctggtgccagcataggctagaagaggtcaccagatcctttgcaattggagttataggtggttgtgagctgccctatgggtgctggaactcaaacttgggtcccttgaaggagcagccagtacttttagcaattgagccatctatccagcctttagcatatagagctataggaagaatggctttggtgcttgcaataatgctgcatcgtcatccctgacttgctggtctccatctctacccctgtccaaggtgagcgatcactggcaatgtttggtttctggataagaatcccagggctacatcctatcaaatccagcctctgagtagccttttaaacacaaatgtggctgcatgaggttgttagcatatctttttaatcaagaaaaatggccagtaagatggcttagtgggtaaaggtgactgctactaacccagatgacctgaattcaattcctggatcccatatgatggaaggaaagaacctactcaggcaagttgtccattgatctcttcatgcatactgtggcacatgtatacacacacacacatacacacacacacacacacacacacacacacacagagagagagagagagagagagagagagagagagagagagagagagagagaaatataatggggaaaaaagactgtggggaagaataatcttttacagggaagagcacaccaactgttttttcaccaaaggtcagccctgaaaatatacagataagtaacattgtacagactgagcaggttgtatttatgtatttaagaatatatatgtgtgtatgcatatacacatatgtgcatgacaaaaattaagggaaaaggaggtcatggaattgaaaaagtacaagcaggaatatatggcaagatttggaggagggaaaggtaatggagaaatgatgcgattatattatactctcaaaaatgaaaaaaaagttttaaaatataaaaattactttagccacctggggaggatagaattcatagcccctggtcttataaacgagaggctaaggcgatagtaattagtccacttcagaactaggtcaaacagtttatttggggttcaggtggtgagagtcaatccagagtggttcaagcatgaggaacttatggaggtgtttgggggagtgtgtgtgtgtgtgtgtgtgtgtgtaggctggggaccccacccttccatccatcccatttgctccccatatgctctctagaactgttagttccaatttctttctcacatctccttattaggtgaggtgtggcaggctggggagaggatggaatgtgtaccctcagctacacccctggaacttgtctggatcccttttgctcctttggcattgtctatccaccatgttctgtgtatgggaatctaaatggaagttaaaggagcttgaccatgggcctagacacagccgtcatccatcccccccccccccactatcctcctcttctactgtccttgcattgtcttcgggtgtttgggaatatgaaagagcttttctggtcctctatcctcgggagcagacaactagagatgatctttcttcaagggagacactttatgcagatttttccgttcaagaatgataaacagtcatggcaagccctggcactgatacaaataccagtctggccattaaacgccagtttctaagaggtatctcaacatctttggcaagatacaatgtccaaggaagacacagtgcagagataagaaagaagacatctgtatttattagactgggtgctatcggggaagctgtagctatgttaaaaataacatgtgatttgaagttcacaggataaatatagctagccgggaacaaatgagtaacgtcggtaccgtgggctgtgctcccagccaggggatcctgagtgctgagattcagttttacttttgacattccttaggcattcgcaaggcacaaagtgaagccccactcttgggtacataaacaagagcctgttagggaaataaaaacggtcttctattttacaactacattgcttatttgttagtgccgttcttacattctgtgttatgtttctgtcggctcttggtatggccatgatgtaaaagccttcttatcatcatggcagctgaagaagaactggggcgaggatagccagcacccgggagtcactgccacaacgtgtgagctacattgtagcttggctctaggtctgttgcttttgcttgatttggtataggaattgagcccaggcgtgccaagcgtgcgaagcacacaccatcccagggaactgcaccctcagtccccaacctaacttttaaatttcatgtaatattgtgcactttagaaaggtacccttccaaaactcttccattttacccgtttttaagaagggtcttaggtccttctgggtcagcagagccagcataccctggggacgtatcacgaatgcacattctttggtccaccctcccgaccttactgtaccaggaactgtgggaatgggacccagtgacgctaagttaacgagccttctgggaaattctgatgttggcttgagaaccacagttccaccaggagaacgaaaggaaatagcgccccctggaggctttatgaccacagccaccagaagtagttgcatatacccagagaggcctggcaagtcctactgctcctctctgtacagactgttgccagcaacttcagagctccggcttgatttaactaagagatgctgccattttgaagatgggtgactatgggagtattagaaaactagtatttactgatcagtttctctctttcatttctggtacttggctctccattgagcagtttctcagctttgtctcagacctctgcagcaggctcctggtcgcattctcagctcttgctggcctcccacatggagaaaggctgtttgtttttttctatgtttacgctgttcaggcaacagcaggagcaggtacatgcctcctgcaactgtgccctttgcaaggaggaggtcctggagggcaggggccacggttgaatacctttgatccctgctaggacactgtgtccttgatgggaggccacgtgaagatactttcaaacgaatacatcgattaagacagccagtagtcagcatgcattatccgttctgtgttccatcaagcagttctcagtgtgaaatgccctgacatgtccatctctaggttttctaaatcccacctgttgttctccttcaaagtgaactgcagactgtggaaagtgtaaaagctagtattgaaacccggctttgatctactcttaaggcgaatgagtgcccttaagttaagtctaggtaggtaatagaaaaagtgaaggtattcaagttattcaaaatcaagaattatgaatatatataaaccactagaagtctgaacttgtattttgttatgtttttcttttcttcctttattttttttgggggggtctcactccacagcccaagttaatgtgtatctcagttttccttctgggattatagacacccactaccattcactggaaattgtaattgatatgccagttggtgaatacaaataccttgatgttcaggcagttaggaattgctctatgagcaggaaaatacagggtgtaaataagattgtcaggttcctgatctttaagaattattttctgtttgggaagatttgatggaagagtttgtctggccacaaaaagggaagcagaggccctgatgctaagatcaaagggaaccaaagaacagaagtatgcctcccacccaaggaggactgatcctggtcaagttgtcttggaacatgttctgtaaaagaaggaacccagtccgggctgtcacagaacagttagaccatagccacatctaggagggagaccttagttgaaatcagattgcttttgcctgtgccacgacactgtccccagtgcctgaaaataaatcagatgttgggacaaactcaagcagtgttacacacacacacacacacacacacacacacacacacacacacacacacacagagtcaaacagagtcacacacacacagaatcagacagagtctcacacacataaacacacagagtcagagtcacacacagtcacatacatacatacacacagaaagtcagagtctcacacacacacagagtcatacacacgtacacacacagtcaataaagtggtaggttagtccaggaaggacttctttccttccttccttccttccttccttccttccttccttccttccttccttcctcccttcctcccttcctccctccctcccttcctcccttcctcccttccttccttccttctctttcttttcccccaagacctggtttctctgtatagccctggctgtcctggaacttgctctgtagactaaattagccttgaactcagagatccacctgcttctgccttttgagaacgggattaaaggtgggcatacatgactgcaatcttaagggcctcctttctgaacacattattattgtcaggagcccacacaccagggtctctcatattcctgccttttcacagttgaatttgttagagctacatcctgtgttccactcacagaggcaggatccagttcccaggtctttgtggatatgcagagcatcagcagagccctaagtgggggactaagtctgttggtaaccacacaccagagaacattgtttccagtcttgtgatcttgcctagatgcaggcaggaaggagttaccttgtctgtagaaatcaaacaaggctgattaaaagtcagtctgctttttgttatcacaatgtacttataactagaaaccaggtcagtgacaaaatgcaccttcctttggaggctgaccttttctatagctgcctccaaggttgccatgttactgtcacaattttggattcagtttgtgacacctttttgccttttctttgctcaaaatatgacattccacatggtctccctggcttctctctccaggggctgctacttttaatggatgctgtgaagaaccccttttcttattttggggttcacagctcttccctttacaggtagtctttcccacagcctcccacccaccttctttatctactgtggtagtttgaatgtaattgggtcccatagtcttataggtagtggtactataagagggtgtggctttgttggaggtgagatatggccttgttgcaggaagtgtgtccttgtaggggtgggctttgaggtttcctatgctcaggataccacccagtgtctcagttgacttcctgttgctttccaatcaagatgtagccagcaccaggtcttcctgaaggctgccatgcttcctgctgtgatcataatggaccaaacctctgaaattataagcaagccaccccaacctaaatgtttttccttctatgagttgccttaaaaggtatttcttcacagcaataaaaaccctaactaagacacctatactgctacttccttttgaacatccttgtgaaagaaggtctctgtatttgtagaactcttcagctctcttggccacatcaagtcacttatttttgttgtccagggtactgctgaagggctctcctagtcctgagcatggcaagcatggctctggcaggccttcccttctcctaaaaactttttaggttacattcctaaagctagtcagcaaggtctatttcatcatttggccacttcctcctcactaaggatgactgccaaagtctgtctagttatcaaagtattgaagtccaacaatcaaaatccatcttgtggctaccctaattaacattcccaatcaaaattaaacacctcatcctaacacggtttttccccttgtacctttataaattgccatttgcatatgtgctgtatctgtctcctctccatccagaagcagtcctttgtccctcgggggcaaatattccttccccctcttccttgttccattcctcttttccctcatcttctacctcctgtctttgtttttatttcctgacctctgtccctctggggcagataaatctcctttgttctaaaaaacgtgcttttggagggtcttgtgctgatactggccctttcacctgcctttttattcaagcacatttactgcaggaaaaaaaaaagcacattaatacaatgtttagtggataattctcatagtccaggcaccaacagcatacttgggcaggagaggaatgaactgaacagacattatctctaaacccagagaaaaataggagaaataattttagatagtaataagtgtagtgagggaaataagacagtgtagtgtgatagagtgcaactggagatgacaccacttcaggcatgtgacagaaacctttttgaagatggatgcttaaccagagacctcagtgcccagctgacaagtgactacccaacaaaacagctaacgattcaatcaaacttagccaaccagccatcaaccaaacaacaggctaagcagccagccagcccactggccagaaagtcaccaatgtgaaagtattacaagcatagagccacaaaggcagagttcctgagttaatttggtgtgtttcataaataaaaagaggccagtgccaacaactaactagtgtaaaaaaagtagtaactgcggcttcctcctcctgggtgtttatagttggagactgctgcctacagagaccacatgagaccagccacaccctcctctgtgtgctgtgcataattagcattctgtggttccaggttgttgccaaagttggtgcagctctatcagagtttcaatagcacacttaaccccagcttttctgtgcacgtatgtgtatgtgtctattctgtacacctgagtgtctgccccttgtctgtaatctgacagatgatgatactgtcctgttctaaatacattgacctctttccaaaagtacatcaaacaccccagccttattcctatttcagaaacattgccctttctgaggcttttcaggttctttcagggacagttttacttgtcagttagctgctttgcagacatttccatcagtgcttgccatgtggtctgtcatgtaatcatgattaccccttaagttttgtctgtcaggtttacaggcaaggaaatagaaacttttggaggttcaaaacttccccaaagaccactaaactagcaagtgttaagaaggctaacatctacacttccaacctcataatattttgctgtgatttgtgcagacaacatacatgggtggtctgtgcagagtgtttctggtgcagccctggaatactttcttacatggcagctaaaaagatatactttatccactattactaggtgagctagaatccaactgagcatgccaggaggagcaagccataagcagcactcctccacagcttctgcatagctcctgattcctggttcctgccccgacccacctcagtgatagactgtggtgtggaactgtaagcaaaaatgagcccttttctccccaaattgcttttggctatggtgttttatcatagcaacagaaaccctgagacagaatatgagagtgacctgttttcattctctgtgatacaagctatcaggcttacaaaatgtaaatgggttctccatgaataaaaagtcatagaacccaactgccccacaggtccttatgtatctctaggcctgctacattattaccttagatacatggtgtggcatctagtcattgattctatagtgtcaaatgaagctaccaatacctgagcacttgtggcctatgagacactaggatgggtgtttttcttttctttctgattgtttgagacatgtaatctaggatattctcagacttactgtgtaactcaggccgtcctggaactcacaatccttctgcctgtgccttgcatgtgctgggcctattggcatgcactactttggagattaggatggatgaatgtgcttcataaaatattttaatttttcagaacaacaacatagactgtatgttacaacgatgacaagaagaccagttaggttccttgccccagctggccagttgtgtgtttaggacagaatacagctgtggtctgcaacagtgagagctgttttatgaacttcagggctacacaatctactctgccaagtgaatttactagggccccaagaagctttctccctccaccgcatcattaagtttaaattttgcctcttttgtcggacttaaaagcttttccatggtcgctattacagactctggttcatgttcacacgaatcatgccacaaaaacaactcggtatgcacaactttgggatctacaaggaaatctaatcgagtacccctagattgatggggcatgcatttaccactattggccgccagatggcagagccaaccagctcaggcagcaaggagtcaaagcatgagcacaaggcctgtttacagataaggtttgaaatcacaggcctgagaacagaggcacaagattggttgacagcggttctcagcagggaggaccaattgttcaggcagatgcataattagaaaatgataccggagttgctagttttggattctagtatagatagtccttttgtagtacaggaagggctatcctccgagccaaactcccacggtcctcaggagttctgcaggaactcttgactgttgaccttcctttgtagacaccgggaggagacggtcatgggaccctaacccgagtatccagccactcctctcaaccagtcctacgtaattcttccctaactgctcgtggtcctgcaagaggggccaaaggatttatgttgcaggtattgagggaacgagtttgttacccagccatggacggaagccatcattcctgctgggtgcagaccttccagtgtggctgccttatggtcatctgtgtgcctccccataaccgccgcccccccccattgctctgcaaggaagcctagcaatctgggtttctgggtgaactttggtaaagttgcaccccagtttgtcactggggccttagaaagagggatggacgttgtttacatctctcttcggaaagaattttagcaaaaaaatttgtcttgtgtgtgtgtgtgtgtgtgtgtgtgtgtgtgtgtgtgtggagggtatttgcacatgagtgcaggtgcctgtagaggctagaagagggcattcagtccttggaacagtacttaacagtgtttgtgagctctgctgtgtgggcactgggaactgaactcttttctgcaaaggtgggatgcactcttaactgctgagccactctccagcccccatatatagcactcatggtggcagagctattaactctaggtgtgggcatgtgaagatgaaaggtgcttgagcaggaagctatgagtaaaatgcttaatgggtctccttaatgggtcttaagacatccttaatgggtctctaccttatttttttgaggtaggttctctcactgatctagcatacagatttagctggattggctagccagtgaggcccaggggtccgtctctctctacctcccacattctagggccacaggtgtgtgccattgcttcgaactgtttacatggatgctgaggatctgaactcagctcctcatgcttggtggcaagcatcaccccctgggtctaatccccagccccaagactttccttttaaagaaatgagaagttttagccactgagatttctatttcagtatcagagggggtgcattatgtagtgatatattatttatgttttattaaggcttgtctgaggattcagaaagccaagtcagccacaagccatagaagccaggcacacacctttaatcccagctgccagaagctaggaggtggtggtacacacctttaatcctaaaatttggtattaagagatagatgggtctttgtgagttcaaggccacccagatatgcacaagagtgaatcactctaaaagagaattatacctcacatctttaatatcattatgaaagtatataagacagaagcaaagtctcagagaggagagtttacagtctgaggctgagagctcatggaggcaggatcggcccattcagcctgaggtagaggtaagaagctggtggccagctgctttgcttttctgatcttcagcttgaagtttgagccccagtatcagtctctgggtcatttatttttcatgttacagtattagacaaggagcccaacctgatgttcagaggctctagggagatctttgcaccattagcccccaggctggtgtttcacaggtgacattcaggcgaatttggtatggctttccctttaagtgtgagtcagcttattaactgaagaattcctgaatggatgaacacttgagtgggaggtgtcagctaaaaaggtgtgactgcatgtctgcagtccatctgtgtgtttctggagaaattgtgactgagaagctacatggaaagatggaagatacaacaatgcactgctactccaggcatcagacccccatgttgtcacctaagcatcgggtctgtctcccttgggagaggaaatgctagatcatgctccgtacgtatgttcaagggttcttatttttcccgtggttgtaatgaatggccatactaaaaataaaaggcatggctggggagatgtcttacagagaaaagggcttgttgacacacaagcctggcaaccttgaggccagtcctcagaacccaagtgcaagactggacgcatggcataccgctctaatcccagggccccccaaattcagatgggaggccgagcttgcagcccagctgtcccggagtagagggtgacagaaacaatcagctagtgagaacccacttcaatgttgacaactgacttgtagacacatgctaaggctctcacacacacacacacacacacacacacacacaaataaatttactctctcacagacccagagggaggaaacttaagactatgtcctgtgtccttcaagctgcgttctgatggaagcttagtggagaagatgtgtccttttctcagcttgtacaggctgccaaaattcattccttggcttgtgaccttccttcgcccttcaaaccagcaatgaagcatccaccaccctgtgacctaagcattcctcatcacacgtcccctcactctgaccctcctcttagacttttgtgattccactgagtaactgatcctacagtccctggtttaaacacattggcacaaagcccattttgtcaaggaaacacatagggactagaacattgacatctttaagggattgcattctgctttacacaccagtgttgtatggcttatttttgttgccatggtgactttgggggtggtattgttgcaccagtcaactacatcaatggcatttgcttttctcagggcttgcctttctctgcccaggttcctggattatgcagagttggatgaacattgtcagacctgggtctaccctagggattgtggtcagcacactgtcgtgtttgtatctaaggaaacaaagagatagagtgtcaggactctttggacatgagggtatcttaagagattgagtcatcttttcattttatgtgtgaagagaatgaggttctgaggggccagtgtggagagaagacagagaggcctctgcatggagtagttctgtgtggaggagaagctcacatggccagccaagcagatgagcactcatttactaattcttttcttgcagcattccagggactgtgactgtgttgtggaagcctctgtcaggggccactggctgtataagtttggcatttgccaccatgacattgggttgatgatgggacattttcaaaaagcacaaggggaaaaaaaaaaaggtttctgtagtttgctgatctgtggcaacagctgtttactgatgagtttttaaaaatgacagaatggggtgattaaagatgaagacattgttgtcttagactcagaaacatgatctaaggaatagagctgaagtgtgggggaaaatctgtcctaggctttagtttaatttttgttttgttttgagacaaggttgtgatgcatggcctgatttctgattgcccagcccctgcttcctgtgtgttgggaggaacaagcatttaccatcattcctgcctaggattgcatttaaaaactttttttcttcaaagtttttagagaagcatagattgcaggacactagatatcctaagtccttagaaaaggcccagaagattttgttatttttcaaacccctaaaagtgcagagaaatccaaggtgggttgtaaagtaagagtgtgctcagggtgcagaaggagggcacagaatgggcagaacagagacccaatgtcaaacaagtcccttggtttccctgagggtgaccacccagccccactcgtctgggattgtttcattgacccacagtagacaaacacttgggcctgggttatctatggaaacccagcatctgggccagtcctgacatagaaggtggtggtctccctgcctgcctcaggcctttgctgttggggttccccactcccgaaggcctggtttgctgatttgtggcttaacatttttttttttttttaaatgggatctgctagttcctcccataaaccacatcagggtatgcattgctttgggtcgggtgatgtaatttacttgtcagtataccttttagtgtggaaatgtttagggagtcaaactaattagagattatgtgtctggtttggcttggagaaccgtggtcattttgcttctctgttgccttgctaacaccccaagtggggaaagaagcaggagcaggggagatatgatgctgaaaggattattttggggagctggggtcaatgtgacccaagctggagtcacttggcaagagggagccgcaggtaatgtctccattggatgagggcagatgtgtgggggcattttctcgattgaagattagtggtgctgtccctgggggcatctgggatatatatatatacacacacaaaaggagccagctatgaggaacaaaccagtaagcattgttcctctgtggcctctgcttcaattcctgcctccaggttctggccttgagttcccgcctggattttcctcagtgatggacggtgacttggaagtataagccgagtaaaccccttcctccccgagatactccttatcagaatattttatcatagcaacagaaacaaagctcgtgtaacacagagctcttgtaaggtacattggagactgtgggatgggggtggagggggatatggatatagtgaatgccaaagtcaacttatgaaaaggccctgagcacctacatgacagaagctgccatcatgtgaaggccaggccaggcttcagatctgcctggctagtctagtgacaaggatatgggccacttgcttcctcagaagttgcacaggggccggtggcagcagtgactagagcggatttcgtaattcttcatgattctcttgaagcactctgatttgtcctccgtgcagcctttaactgaaaaccactggattccgcctggagaaagaaaagatgctgagatgggtgggtgtgtaagatggtgccaccctccaggtggaaataaaagcccaagtgaaatctccagagataggaatctagacttcctcctgtgaggagtggctccctatccccttagaactcccaggtaaactatctgagctgaggactttgtggtacacatgcttcagaattgcaaaacaaccacagctttctacgagacattttggctgcgttagctgtgggggagcttgctcagaactaaccctgcatcactcaggtttgtaacttaaccaaaaggccgaatctgcacaatggtattccagtaagtgcttcctagagatggagtcttctatgcaactccactagttttctgtttatttgttttgctttgaaacaaggcctcgctatgtaatgtaggctgcccttcagttctcaagcctcctgtttcaaccttttgggttctggggttgccagtgtgtgccaccattcctggcctttaccccatgggttcaatcactgtagaacctgtgtaaatggacaaagtgaaaaacaagctccagcagtgcccccagcttcagatatgctgggaggactgacgagcaccctagagcaacaaacacaaaaagtgcttcctcagccagagatgcttttgcttccccaaccccaggatgtaagctgccactcagagacttctgctatcacagttgggtagggcatcaggggacatctttctgggcatttaggaacaaaagactagggatgttgctgtaagcgccataatgaaagtcactcctgtgttgctcatcatcctgacctgtgacaaaacacctgaggtgagttggaaaacaaaacaaaacaccaaaaaaacccccccaaacaaacaaacaaacaaacaaaaaccacaatggtttgttttggctcagtccgtggtttcttggccatgttgcttttttggcctatggtcagaaatataaccatagtgggagagcatggctaaggaagccatacacctcatggtgtccaggaaacagaaagagaaggtggggaacttactattcccttcaatagcatgtgccctggggtgtaacttccttcctctaggccctgcctcctaacgtgctaaaggctggagaccaggcctaaaagacacgagcctttgggggacattggagatccataccaccaaagcattaatcttccacaactgcccctgttggcaatgctgaaaagctactggtaaagccacattaaaatgtaacttcaattctgtttaacccctatcagtgagaaatggcaaaatttccaagatactgaactcttctcacatagcagagccattccaggtcattgatccatcacaggcagttgttagcagttttccaggcaagctttcaggctctaatctatgcacagaatcccttaattcttatgaggattaagtatgaatgcccacaatcaagagtggaagagcggtgtcagagaaccaatgtccttggctctgaggggctttgggatgtttctccatcagtgtaagaaagactttgaatagcaaagttcaaagttacagggcaggtaggctatgaagattgacagagccctgttgcttcttaataccaatcccgttgaggtgggaattgtggctcttcctctctcttgcataactttgatgccctctgatttttgttctttcctcccaattccacgacgtttggctttgctgatttctgtttctatgtagaccactatgtgtattaatttgtaattgacttcatcccacttgacaatagttaagatatttacctgtattaacaagtagatctagtacatgctacatagcagacagcattgcaaggtttggatacaacatagtccaactgcttcctatatgtgagcattgaggccatttattaaaagagtattttgcctctatttatttagtgtgtgtgtgcaattatccttcatatagtaagacatatttgttattgatcttatggactaaacatgtcatattttttttctatacctcacattgccttaatttttactagcaaggttaaattgctttttggtttgttttcatattgctattcactgtgccaaggattgccttcatgttttattttttcctgatagttggttttgtgtatctgttagtgtatggtatgtgttcttgctggtgtgtgtgtttgtgtctgtgcatgtacatgcagtgtaaaggtcagaggttattagcaggtatctttcctccattactgtcttagtttgggatgctgggtctctttctgggcttgatgttcgttgattcagccaggctggccaatttgtctgcttggctttggccccagtggaatacatgcacacactaccaagtctatcttttttacttggtttcctgggatctgaatttgtctctccatgcacttgactgaacagtctacccactccctagctcatcttttaaaaagaaaaattttgaaattattttcctggataggtaatagtatgtttttctataatttatttctttttattatcttagttctttgtcttttacattgacttattatttaacattatcatttattttacagattataatatggacacattcaaatcaattgtgttctttatgacttttgggttttgaatgctaaggtgtctcctctctttcaaacttgaaatgtgttcaccagcctttacttctaattttgtcagcaattggtttttgtgttgaacatgaaatctgggcagttccaggagtctgcatttaggaaactctgcaaataatctactaattattttctgagatgtgaatgttgtaaatgaggctacatgtagctttattaatattttgggggtcaaagtgcttgtatttgaattttggctaccacactcatttatcaatagctttaaaaattatttaatctttatgtgcctccaatttttcatttaaaaaaatggagaatggagacagtagagagatgacccagaggtcttgcagaagacccaggttgcatccctagtgttcacatagtagcccacagcctgtaacttcagttctagaggattcaatgccctcttctggctttcagaagctcctgtaagcatgtaatgtatataaacctatacatgcacacacatatatatgtatgaataatgtatagatacatcttcaaaatggggataaagagctatggacatagcttagacgtcgagcacttgtcatgtgtatagccttggtttcaatttccagcaatcgaaaaataagaagaaaagtgagatgttttggatagggggattagtgatgggatccatccaggtcatatggttgtatgactggagtaatgtggtcctggtcaagccctcattataacactgggcatgtggcaggtgttagcaaatgataaaaaggattatctctgcacttctaagcatcaagacttacctttagtgaaggtctctcttatacaaaactgaccaggctttgttctgcaggttccaaggtctaacagacatccatggaatgggatggagagattgcatgacctgcaaatcacacctccgacacctccaagtacagcaaagaaagaggcaattgtgatggagaccagagagagtgagcagagccaagggagagcaagaaggagagagggattcaagaatatcagtgattttcagctataaacagtaagcaatgcttaaaaaatttattataaaaatccacataaattaagattatttcattttgagaatttaatgagggaaatttcaaagcattgctacattaatggatcagaagcaccctgaattgacaggaatcaaaaacgaggacactttctgggtgcctaattaaaacatcaatttcaccaggcacaaacccacagctaggtcttcatttccaagcctagggcagtatactatagacctgaatattcattcattaacacttacttattggttatccttcgtactcaaattcatttgttcaataatgttgcttatttgattatgtacaactagctcacagatttttggatttaggcagtgtctagaatattagttcccagtttatgagtgcatcagatatagatgagtgactgaaatagatttctgtgtgcccggaagacttgaattagaatgcatgggaagatgagtccatgaatctgcctttcagatgtgcagtgctagcttggatagagcggggacacagatgtctggactggtgctggagaataaggtctctcagctcagtttctacagggaccctggccaatgagagaaagcttgttactgttaagagtaacccaggccgggcattggtggtgcaggcgtttaatcccagcactggggaggtagaggcagaggcaggtggatctctgtgagttcaaggccagcctggtctccagagcaagtgccacgataggctccaaagctacacagagaaaccctgtctcgaaaaacaaacaaacaaaaaaaccaaaaacaaacaaacaaaaaaatgagtaacctagatggttcaaagactttggtaactgggccaaagtttggcctagtgttcatacttctccctcccttccttccctccttccttttttccttccctccctccctccctccctccctccctccttccttcctttttttttttttttttttttttttttttttttttttggctagggtcttactatgtagcctgtagctttggctggtctggaatgtgttctctgtagatcagggtggccttgaactcacagaaaccttgttgcctctgccccttgagtgctgggatttttaggtgtgcaccaccatacctggcatttcccctttcaatacataattaccactgtcatgttacttttatttactaataactcatataagaacttactagacatatggtacaatgtatttttttttttttcaaatcttcctttgctacaaccaaggtgactttcaatagaagacagtctggggaatagaccctttagtcagatcaattaacaaatatatttttgtgtggatatgcatgcaataatgactgaagccatgaatttcaggaagaaatggggatgggtatataggagggtttggagggaaaaaagggaaatgaaaaatgttgtaattaaaatacagtctcaaaaataaacagtagcaaaaaatggattttatgcctaggaatctgctaagtaatttacatgcattagcccaattatttaaaaaagtatgtttcagccagggattgtatttgccaatatctccccaaaacaagtcttaatagctttcataagtggaagagatgctacctgagcccttgttcttggcagtaattctgcctccccatagctgccagcctttcatgtatcccaggcctctcctcccctcctcctgctaaagatctggctggattattgggccaactgtttttcagcgactccatgatggagttttcctctcgggtttatcctgagccagtcttccaggcagctcttagagctccagctgcttactcagaccttcttttaaagcataggaggactgaggcaggggctctgtgaccaccaagaacacttcctttgattcacgccagcttttattcacatctccctttgtgagcagaaaaagtaatgcagtcctctgaattatttaaaatgagatttctgttattaatacttaattagcacacaaagatataggtttcactatgacattttcatctatgtatatccatgtaccctgttcatagtcacctctgcatttcctccctcttcccctcccctcccctctccccacccctcctaattggtcctcttcacaaatggtcttcctatctctctctgtctctgtctctgtctgtctccctcccgctctgtctctctctctctctctctctctctctctctctctctctctctgtctctctctcacacacacagggtgtaaaaatctagaacacaaatatgaggaaaaaaataagctgtttgttgtgggtctggcttatttatttatttatttttttacatgaaaatctctagcaccgttgtcctttactgaattactttttccagatatccaagtcactgaagatattttcttgtgctatttcacctttcacgtgctcctcccctttatggaagagatgatgtataagtagagaatgcggcacagacctgagctgcctcctgcatctaatgagagaagtgtaggaaccagaaggtctgtgctgcgttttctactgacacatctcttccacgcgctgtttactgatgcagtttcttcctgtacaaaatgagaaaaaacacctcacgtgtatggaggactaaatgaatcaatacacatgaacctttaggatggaatctgaccactaaatgttcagagattaggtcttgttctcagtatccagagcctcacagtgtctcatagagagaagataattaacccaagagaaggtttagaggaagcaagagaccggcagcttctacaagcacacttccccagtcacctcgtttaagtccactccactcaagcatattgtaactcttcattttcttaaccaactgtcctctatttgattcttcttttaacttaccacttaagaggcaggataagataaaaaccccagcaatggcagttctcattcttagatttgcaggccaaagaaagggagaaggacaggcaggttgagccatctctcctcttcctgaggaagacaaatgagcacatggtagccatttaaaggggagatactggtttagctccattttcttttcattaagaaagtatacatacatttgttttgtgaaggagcaataattcaaagcatccttttttataaaaataaccgtaaaaccattcctagttctagagtttagatatcttttttgttgttgttttaatcaatgtctcagtctcttttcacttcccttttaactacagttgcttcagctcaaatatgaagtgaggtaatcgatgcttttaggttaatgtcttcaaaaatccttctgttgctcaaagggaaaagttcatttcagcatcacagactgaagctcatggcaactggtcacaggcatgagaagaatgccgctgatagttagcagccatgctcattaagtcatcagaattgctaaaatatcagtagtcatccacctacctctcttgtggcaattttccttggctaagcttcttaaaaagactgatcacaggtagtttctggtgagtgaggtgtgctgtaactgcaaccaacagcctgatcgtctagattctgaacagttgaaacagtaacagatgcccactcaagaatacagagaactgcccatgtgagcatccgcatctgtaccgagtgagttctccttactcaggaaccgtgttggctaagtcagcctactcattgtaaagcggcctcacattttctataggttgtacagcttggacacacagctacatggactcaccatttagtatacaaagtactcagctcagtggacaaagcactttcctttttttggtttgcttgctggggtttgaacccaggacttatcatttgaacacacacacacttatcatgtacccacccacctcagctacactgagaattcctgattttgatgtctctgaaaaaataccagggaatccttagatccaaaacttagatcaaattatagaagcatttttgagttttaaaaataatgtttattcttaacaggtctgaatcagtagatttcttcttgaaacaaatgaaaaatttaagaacaccagagtctctttgagaacactgtcatcaagccccatgctatcctcatatgtaagtaaccccattattaggatgctgggtgtttcttaacaaattatatcccatggtttatccagatggactccttttctgcacatctgcattgtttacttgtggcatggaactatgtgccatgttgcttcttgtgttatcttggcaaaaataataccttctacttacttttcctttgtatttcattcaaaaatataatgacaatcttcttatgtaaattttaaaatctacttcaaatttcccactgatttgaatcacagaatccagggaatgaaaagatatatgatactgaagagttcataaacacacaaatattaggggtatggctgaatgaatatgagtcacctttgcatggatgaggatggtcaccacccagatcaaacatgccatgttgtcttctgtctcagaggtctgctcacactccgtttctagttgtcccttcttccccagaaaaataacttccccccccttttttttaaatattattggttaatggtacctgatcctgaaatttataggttcatacagtagacactgctatcgacttgtgcatcactattttgtatctagctgtcattcctaattcatctgataacaatgcccattcctaaattccaagacacacagtggtcacttttagaggtctaatactctataatgtttttcttgcttccactaaaaactgtgtgtgtgtgtgtgtgcgtgtgtgtgtgtgtgtgtgtgtgtgtgtgcaatatatattaataaggatcttgagtcagaattagggataacagtaaaatgaacctcatgcagatcttgtgaagataaaaaaagaatgacctggggcaaagagctctctccacacagtgcccgctgggtgaggtattggatggaaggcctggggagaaataaagaaaataaagtaaagaataaaataaataaagaagactaaaggagtatctgggacaaggaagtcttgcataaactgatgactgatgccatcaagtttattaaaaagtacagcatcatatttactattttcagtggtcagaggcagcagtgagaggttgccagagaactaaattagatagtgttggcaaagagaacatgggatacctcagacacagctgccctaggactgacacaaagctcaggaggaagaattgggtcctcagaagccgccatcttgacgcttgtgaggcactggctccagcctcagcctggccttgccaagtccattcctggacaaggacgcagaactaaagttccctttgttcttttggtcagagcctccgagaaagtcttgggtcagtctggcctctcacagtacaacagcccaaataaacttcaagtgactgatagcgagttcccacagttggttgaaaattttgcagtaggtcagtcaagaactgatgaaggctcgaagagggaagaagcagaaaggatggcaaagaggcaacaactgagagaaccaaagcctccccaaggacggagggctccctatcttcactctggcggtctgtggagcagctaggactaatctcttctatacttgctacataaccttatcaagacttctctgtctagtaagaaattcagtgaagaaatgtcccaccatctcctgcttctctcaaaaggcctgcggcactacagatgaatgctagtgagtggagctgcctctcatggggagagctaggggaatgaatcccagatgacctcagcttggctaaaggtagtaggaaggtgtgtgtgtgtgtgtgtgtgtgtgtgtgtgtgtgtgtgtgtgtgtttgtgtgtgtgtgtgcgtgcgtgcgcacgtttggggttacatgtagggagaaagacaaaagcaggaaggatggctgaggtttaggggttatggcttgggcaatcaggtggtttgttatgttgttaactgaaaaagtgaagtcacgtgaaaaataaatttgatataggaaattcatgagctcctactgagatgatttcaagtaaagatatcaagtagcaggtggctgtgagccccaatttcaagagcagttagcactagaatataaatccgatgtgttgcttgaagcatgtatatgagactcaagggaacggcctactgcatgcttataatacatagaggggatgaattttccttgcagagtagcaagctatcaatttagaaactcttgtctacatgactcttaaatatcatcaatggaaaaacccaaaacatttaggaaacgaatgggaatattgtgaggtgaggaatacagaggagcccagggctctctccagatttccacacttcttgtggaaatacctgtctcccacatattcatgttttgaaaccttaagctgcagtggggctacactttgagatgggcctttacagaggcaactaagattaaatgacattgtaagaatgaggcccagatcctacatgattaattccttataagaaaaaaaagcttgtaccctggtcccctcccagtcatactcaaagtggacatggaaaaaagcaggtagagagccttcatcagatatgcagtctgcaggatccttgaccttgtaacttccagattatgagaaaataactgtgatgtcagcccaccccagcctggtatctgtcaacagtcctacagcctgattaggtgatgcaattcacagtaagtcctacagcctgagctggtgatgcagtgatcagtcctatagcctgagctggtgatgcagaaacagtcctacagcctgagcaggtgatacagtcaacagtcccgagtactctcatatgttaaagatactgggtaggcgtggccttgagtttggaagcacagaggggtttggagatgaagtgttaggtcagtgcaagtaccagacatgaatgtactaaagagcacctcaattaaatagagggcacagaaaggactgtgtccctggtaagctagaaaaagaaaaactagcccttagagaagaacatcagccatggtgctgcatagagagttgaaacatgtagccattctgaagctatggcccgtagccattctgaagctaaatgttaaattttacactttcactatcaattcttttgcacttatttcgttaagtttagtatgtgattttttttaaatttgcaagttctttacaataatttgtgtgtgtgtgtgtgtgtgtgtgtgtgtgtgtgtgtgtgtgtgtgtgtgtgtttgagatagggtttctctgtgtagctctagctgtcttggaactagctttatagaccaggctggccttgaactcacagagacctgcttgcttctgcaccactaccacccagtctacaataaacttttaataatattaaaaataaagcaaatgataccctttgcaagacagacagcaataacaccaacaaaataccatgtatttcccctcaaaatttttccatggacttggcataatctatatcattttcataatttttagaaatatagacaaataattggagtttaaaatcacaagaaccatgcacaggcttgtcatcctagcacttgggaggcagatgcaggagattctcaagttcaaggccagcctgggccatataagattctttctttaaaaaaaatccataagggagaaagtaaaaaggattgtagggcccccaggaacagtaacaccaatgtgagtctacctagtaatacaactgctttatttcaacctcaaagaatccctgaatataaaacccatgcaaacttgaaacgcacaaggaagccacctaccacaaacaagggcttgagaaaggaggagtcagacctggaacaacaatctatgtagatttagaattgctggatacagaatccaagctgagagattacagcttaagttagatggggcagagtgagggataaaatctgaaacaggcaaaagagaccgccacattgaacacatagtgcataaaaggcaaataggatttccaagaataaaaagcacaactgtttgccaacaaacacttcctgagcatctgctgtgtgacaggcatcctcctggtaactgggttcaccacgggaacaaaagaaacgacaagtatttattcatctcatacagcttactttgtagagagagaagcagatgcagtttcaaatgagggaaggactgaagagcaagtcatgcaagctgaagaaagaactagtgaagtggaaaataaatcaaacgacataagaacatttgcaaaaatacaaattcctgggcatggtggtgcacacatacatggtggcacacacacataacctcagcattgaggagacagagacagagacagagacagcaggacttggcaagtttgaggtcagcttcatttccgtggcaagttctaggctagctaatgataccttgtctcaaaaaataaaataaaataaaacccaagatgaaagaaacaaataaaatgccaagtaatagaaagatatgaaaacttgagacagatgagaggggagagtaagacgatacagttgtaaaaggaacctggccgaatgtgaaaaacagttttcaaagacttgatggttgatgctttcatcaaagtgatgactattcagacccatcttacagaaataagattcttacaaataaatggagataaaagcataggagtgataacattgacaactaaattcaaggacagggcacaggtgtgagatagtatcttgaaagtactgaagatactacctgcccaggtactagctgcctagagtagacactcagagaggctatctttcaaaaatgaagataatttatacagatattttaatgaaaattaactatcgctcccaagaaagacttgttccaataacttctgaaagttgtgcttcaacaagaaaggaaatagtactgggtgtagcagctcacagttctagtcccagaaattgggaagctaaggcagggggattgctgtgagttcaaggtagcttgagttgcatagtattaagctagtcatgctacatatggacaatctgtcccctcaaaatcaggcaggcagacaaacattccaaaacagaaaagatacccaatgatagtttgagatgtaaggcaaaatcatgggggaaattatggtaaaatgaaggataatattgatgacatgaaatgctaataatattcatgttataaagttaaattttagggcaaaagtacagtcacatggcataatacaaagcagtgaaataacttattaaagcatttccaaatctttgtatttgtgtatgaagcaggtaaacactatattcctttaaattagtatcttttatattagaatgactaaggagaatagaaataagaagctgtcttccaaccagtggagagaaatggaatgagaagaaatactgtgagcttaaatgtaattgggggacaaggaacatcaaataagaattcagctcttaaaatgctaataaaggggccgtagagatggctcagcaattaagagtgaatactactcttagtacccatgttgggtattttatgacctcgtgtgctgtaagtccagctctaggggatctgatgctatcttttggctcccacaggtactacacatatatggtacacacaaaacaaacacacatcacacatacacaggaataaatcttactaaacatgctaacaaaattgaaaaattccaaaaagaatggtcaactgtgaactttatattcagagacaagaaacctccctgctgggtggaaacctccctgggtagaggttctccaatgaaggaaagctagtagacttgctctataagacaagttagtcgactttgaagatcccccatggaagacctcactctccctgggaagcagaaaggggatgggatagggggctagtgaggggcaggggaggaggggagggagagggaactcggattgacatgtaaaacaagcttgtttctaatttaaagaaaaagaaaaagaaaaagaaaaagaagatatgtcagtcaacatttgggagcatctccaaatttgaaaataaaagaacactaaaaatgacaaatatttggatgagcacaacaggtttcattctttccgcatatgatatagatgatagttgaagcaaaatatgtaacatcgtcaggtgggagtgtcagcaatacaagtttgaaaggcatctaccttttcatgttagtggcaaaatattagttccaagtagatgaaagaaagtgtgtgtactgcaattgctatagcaaatacactaacaataatgccagaagatgcagcctctcaacaatccatagagcatgtagccacatcgtcagcagagatggaagccctgcaattctttcatagtatatgctgaatgttctcagtgacagaccacatagtactttgcatctgtgtgcctgccaggcatagtggcacatgcctttaatcccagcactggggagacagaggcaggaggatctcagtgagttagagaccagtcttgtctataaagggagttctaggacatccaggactgatacatagagaaaccctatctcaaaaaaaaaaaaaaaaagttccagtctattcttaggacaacctaaggagactctacctagaaaaaacaaaacagaaacaaaaacatgtctattttgtgtatcaaaaaaaaatcaagaaaagttagtgcctacaataaataaggccaaagcaattacccacctatgtgaaaaaaaaaccaacacaaaacacctgagcctacctcatactttataaaagttaaatgcatcatagaaatgcatgtaaaacatagggctctgtcttccaaaagaaaagaaatatcagcatccatacaagaaatagtaacagaaaaccctggtaattatatttaatcaaagctaaaaagctttattctatgaaagatagttgccacattgaaaatgagaagctacaaagtagagaaaatatttgtaaaatcttgtttgataaaatccttgtattaaaaaaaaaacttcgaaaactcagtgatatgaaatcaaataattcagtcattttatttttaataaaacaggcaaaactggaacagatatttttctttctttccttgcttttatgggggtgctggagggtgtggagacagggtctcacagtacatagcccctgctggccagcgctcaactatgtagaccagactagtctcaggctcagagaaattcactggcctctccctctcaagttctgggattaaaggcatcgaccatcattttctgtccccagacatttcctaaagaaaaatacacaggccacatccaccctctgggctcagcccgggttgcacattctgtgtgctgatcagtctggtaggcatagctctcacctctcagcaaagaagtttctgttttcagcagagagatactatcgaagaaatccacaactggtcaaaatacagagaacaagtggccatgggttgctcatctcagctgatacagctctaatacaacccctgcacctaaggctcaaggaatgttatggaagagagggtagaaaatgtgagagccagaagaccagcatgtcttctgtgcaatagtgtcttctatatatgacagggaagctgtacccatgaaatctcaaatcaataacaacaccagatgacatgtcaatgaggatgggggaaatttccccagattgagaaatccacccctagatggagagttacaagcaattagtcactggtgagattgggatgaggcccctaattggtcatccaataccaagttgtcagctctaaacatatagaaatataagcaacacttaagtagactcagctgaaggtgaggattcaatgagttcaccaaacccaagataaatgataaataggtgtttaattggggatgaacagtaagtaactgtcgcggtgtccctgctggaaggatgcaaaccctgcctctccaaaaggggcttccttccccagctcctctcccttaaactggtcagttccatacttgaaaccatgcccagagggcgtggcctctgttacaggtatacaggcaagatgttgctgcaattccccttttagtctaaagaagaaggtggaggcttgatttaaaaaaaagaaaaaaactatatacaacgatagcaaatatcaagtatattctaggagaaggaaaggtaaaaacatacacaaattaaggcctacaaccagtaaagcaacatagagcaatagacatatactacactcagaaggttgtatttacacataaaaatgtatattatatatatacatttataatgtaataataataattaaagaagaacaatttatgaattttagagggaatagaggtcatgggaggaattagatggtaaagagggaggaaaataatgtaaatacaatattcatttataaattttccaaaaccaaaataaaacaataaagaagacatacagacagcaaatcagtgtatgaaaaacaaaacaaaacaaaaacaaaactccacactggcagttatgggggactgctacagaaagtcagaattatacaccagtacacctgtcagaattgctgaaataaaggaaatataacctgaatgtaaccaacagctgcaaaaaagtgttcccaagtatctcatttattgctggtgggaatgtagagtagtttaccctccttgggaaacaatttttcagaattgttgaataaacagaaacatatacttattgtgtaacccagccatctaattcttgggcttttattacattaaagagaaataaaaatttgtatctgaatatttatagtagcaaagcagtgaattagcaaggcgttggtatatccacataatacaatactcttcaaaagtaaaaagtaatgaactgttgatgcatgtccaatgtaatggatatcagtgtcattgtgacgaatgacagaaagcaatatcacaagtgctgcctacttttgattacttttaagagtgtcttagtgacattctggaaaaggcaaaactataatggttgccagggattgaaaacaagatgaggaactgactataaaaagagagcatgaagaaactttgcttgggatgagtgttgatcaagctattttgccttctgtttgcagtagtcattagcaggctacacatttgtcaagactcatagaactgtacatttaaggaataaatttcaataagtatcagctaaaattatagtgaatatgccatgagtgtagttagggagacatattgggagttaaacaaaacaataagaggggctctaacttatactgaggagttggggaagactctgaagaagtgcccttaagttgatctgtgaaaagtgggatttagggagttggggaaagaggattttagatgaaagaatggccattcctctatatctatgagttatacatctatggattcaaccaactgtgcagcaaaaggagttgcatctccattaagatccccagaatgtgctatataggctgctgaggaaacatagtccgtggtcttacccagctgtgaaccctgtgtgctagaacactgaccttgcgaataatatatgctgactggtgcaatagtgacattactgttttaggtgtaaccaactgcttttttttttttaagttggattttaggcttaattaatgggagtgaatacgtttggaattgaaatcatggtcaaaagcttatgtatgagaaagacagattctagaggaggaatcctcctaccgttgttttctaaatgacatgtagccttctaaatactcatacatatatccatagacccgtactgctttcagagttgggcaaaataaacgtattctttttcagtgggtgactgttaatgcagtgactcataagtagcccaagtccaaagaataagtgacatttttactcatctacaaaggacatttttctgtttttgttaatgcttcaatacaatacagctttgctaatatatagattttagtgaaatgtctagatctacatccaaacactaatgacctatataaatataattaataagctacaaaaggtaaaagttaatctaagccatttataatagaaataaaaagcaaagaattttataatacaacatgtaaataagaccattatgaagatttgtaaatatttattggaagtctgttagatctttagggcaactgctatagtttcaacctggcatggctcatattttgagtatgtgctttgaaaggctatggggcctttaggagtgggaccttgctcctggaagtagtatgcgtagggatgggcccctgaaaattaccactggcttctcgttctgattttacctttgcttcttggtccgtcacatgagaaaagatttcactacatgcttctggtgacatgagtgaacttctcttccatactttcttgtatgcagtggactgatatcctctgacaggaaccacaataaatctttcctgccttaagttgcctctgtcagtagtcacagcaactcgaaagacctaattcatccaggataacttgatcatgacttagtgaagattttgtggcttaaaagaatagacattatctcttacagttctctgtgccacaggtgcaagatcacgatgctgtctggccatcctctgctctaaagtttcagagtgtacttttctgcctgcctctgacagcctctggtgagcctagctttcttggggctttctattataggacaccaatgcaccttcctcttgatggagcttcttctccttgtctctatattctcttctgtttctatgacatttgtatgagatttaaggtcacccggaacttccaagatgatttttgatctcatgtctgggaagaacttcttcaaagtaagttacattcgtaaatcccatggataagaacatgaacacatcttccggggaccactacgtaatttactgcatataataaagaatatcatagatgaagcaatgtacctaccatgttcacagctataaagatattaatcattgcccagctgattttattacaaaggaaataacgaaatgctccttaaaaacacctgcaggacacgtgaactcacagaaactgaggcagcatgcacagggcctgcatggggctagatagtgccagaagcaatctccaactgatagctacttgaaaacaaacatttgtttctctaagggagtctcactagtgaaacaaactacattttttgaaaatgtagttttgcctgcacgtatgtctgtgtgaagacgccagatctcctggaagtggagttacagacagttgtgagctgccatgtgggtgctgggagttgaacacagatcctctagaagagcagccagtgctcttaactgctgagctaacattccaaacctggagacaaactacttttaagggtaggttgcatgcccagcagtacatggccaatagaaaacaaactcaacagcatctttggctgggagttccctgtctcataatttcatgttagagcttttcctttctttaaattacacacacacacacacacacacacacacacacacacacacacacacacacacacacacacacacacacacacacacacacacacacacacacacacacacacacacacacacacacacacacacacacacacacacacacacacacacacacacacacacactctttttaccctacaagttctttgtgaatacagtatggtttccagtttagtgttgttaatgagattcctgagtgtgtaaatgagtgggcctctgtgtcaatatttgttttttgggtccctttccttctatttgttttgtcctattctgatatattggtttttgttctatcatattatattacattaatcatattattatcccttagaagcctgtttgttttctagtgagagacaggaagggaatggatctggatgggaggggaggtggagaggaactgggatgagtagaggaaagagaaactataatattagagaaaaaaatcaattttctttttttcttttatattaatgatttgttttaattattattatttatttatttatttttcactttatataccaatcccaattctccctcccttcccgtctcctgcctccccaaccttctcccttcccaacttccatccactcctcatagagggtaaggccttccttggggagccaataaagtctcagataccaagttgaggcaggaccaagcccccatccccatgaagactgggcaaggtatcacaacatagggaatgggctccaaaaagccagttcatgcacccactgccagcaccccccaatagatcaagccacataataacagaagagacaaagactttacaagcaaaaaaaaagtactaatggtaaaagctaaacatagcacatttgactacagtaaacttaggactttttaaattgaaagatgtaaaaaacagtgaaaagatgagctataaagttgaaggtaatatttagaattcaaacaacaaaagatggatatgcaaagactttctgaaaatttagagaaaatggctagcaaaatatattttgtttctaagcattattacaccatacactaaacacacacacacacacacacacacacacacacacacacacacacacacacacacactgaggtacagatagtccaatataaaattgggcaaaatacagaagcatcattaatccaaactatgaaattgcatataagcatctaagaaagagtttattcaaggcaagagttggattgccttgaagaaagcacaggaacaaattttacagaataattgctccaaaatggtttaagagattgtgtggctacagcatactgattgttaccatggtgtcacacatgttgtgctgactggctgctggtaccttgtgttaggattcaggcattacactggcctgccccctgtcacctggcaaaatgcactcaggcagtaccctggtcagcccaggatcctatgattgctatgtcactaagtagtctgcacatagggtggtgcaaaggtccttttaagaagcaaactcctcccacttcctctctctcttccctgctgttcctctaaaggggtagataggactttgcctgtctcctcctcctcctcctcctcctcttactattcctcctcttcttcttcttcctcttctctctctctctctctctctctctctctctctctctctctctctctccctctcttttttccctctgtttctcttctctcccccttcccttccctttcctttctcccaaaaaaacttctctcttaagctgtctgcctgttttgtgtttgtccctcatccaccatggaatccaccaaggttcctctcataccatatttataacagcttgtgtcacacaccccaggaaggataccatgataagcagtacaaggcatgctcaaagttatttctctagagccatcagaacacccacaagaagctaatctgaaatggttgaaggttgaatttagatgagacttgggaatgtagagggacatgactgttgtcccccagcccaggtggaagtgaaacttggagatacttaagtattcacattttaatcatgggaacacacacacacacacacacacacacacacacacacacacacacacacacaccaaaatcaagacaactgagttagcaaaactttaaagaaattttgttgggccctagaagcaacagaaagtcttggaggtggtagattatgtagtgcagatcgtttaaacatttgggattataagatggcattatttcatgagtatcaagttgtacacttctggggatctagcaattctttttgcacaggagcatacagaagccttttgtttggagacagatgatgtgttcaaggatgttcaccgaagcaaggtttaaaaccacaaataaatgctgacagccaatgtcttggggtaaaaatatggacaaataaaccatgatataaccatgtgaagggacagtgtggacccatggagggggatgaaccacattcactcatacaggcactcagggggtcactgaaccaaataagatgtcatcggatgagaaattcaacttttaaatgtttataattaatggacactttcttatatcataacctggggagtgggcagggtagggttcagtaagatgaacaaggccttcaccttaagagcaaaatttaaggggttgtcaacagttatcaagataaactgtccttttgtgctgtactttaaaatatgaacttggcagatcacagcccttgggtcagccagccgctcctgtaaataaaattgtaaacatcggggcttgaggctagagtgagacaaatgctagatcctgtttttatcgaaaagtgtcgtattttctgtctcagactttttgatattagctttgatttttaaaatacgtcattaaaatatgaattgccttgattattggccctgggtgttcttaagcttcatgacttgcaaaagtcttatatacatatatttttaaggttaatcatttcgatgtctcaaacctgaataaaaaataaaatataaagaaaaaaagagggcttcatgtgggaaaggaggtgcacccaacaaaggagaccaaaaaggaggggctggagggagggtatttcccagtgggtgatatttgcaagtgtattgggtcaaggcagctccttttgttagttgctagacttccctgttaaacgtgtcccctctcaatcacctagaccctgccttctgcaatcttgcctaagaatagctcagctgtaagaagaaaccacgttgtgtattcatgtgcatgaaacataaattacaaggtaaaattatgaaaatctgtgtttttgagctttggattttgcttttcacacttggacctgtcaacacagactattaagccaggggtgagagctctcatcactgtctgccctagctaactggtatagtgtgtgtatgtgtgtatgtgtgtgtgtgtgtgtgtgtatgcatgtttgtgtgtgcatatatgtatgtgtgttttgtgtataggcagtacctgtgtgtgggcacatgtgtgtctctgtgtgaatctatctgtgtgtttgtgtgtaggtgtgcatatgtgtgtacatacttgtgcatttggtgtgtgtttcttttagtcatttcagtgctgaagattgaacccagggtcttgggtttgcgtactcactctatcactgagtgtatactctatcactgagctgtatacatctcagcccctcaccactgttttattatgaaaaggtttcactctagtttggatgcccttgaatttactacttttctgtacccactttccaaggtttgtgattacagtgccagcacacctggtctccccccacccccaaggcagggtttttatgtgtagctttggagcctatcctagcactcgctctggagaccaggctggccttgaactcacagagatctgcctgcctctgcctcccgtgtgctgggattaaaagcatgcaccaccagcgcccggcttatttttttattttttatttcttatttcttggttcacacctggtcttttggttttcatcaagtgctttctatccatggtgcctccctctggctgatttttcttgtattttccttttcgtaattgaacccagaaaaatgtgaaaaaaacattgtgagccatgtattatataggagagagtgcaaagctggaagtgaggggagccaggctgggatgtcaggtgacttcagagagtggaggaaagtgattcctggaaggagagagcatgataatgttgcagccccccagagcacaagtaattcagacagtggatcaaaattcagaatttaaaagaataaaagggctgtttattacatacagctctgatgactgcatccaaggtggtatacacataaaggtttctttcttgccatctccttcccctgacaaccctttctaattcagagtatccactgcatgcatgccaaggggaaggagcttcacggttagttggcactacataagggactaaaagtgctgtattatttggttaattttaatctgtacaggttcctcacatcgtatcttctctgaaattggattatatcttacaagcttgctgtagttgcatggataggaccttactgtcttggatttggaaaaatatcatagagactctatcagtgtgtgtgtgtgtgtgtgtgtgtgtgtgtgtgtgtgtgtgtgtgtgtgtgtgtgtgtgtagaggtgcatgaatgctacagcacgtgtgtggaggtcaggcacctctggaatcagttcttgtcttccaccttgtttgagattgttgtgtgcaccaggctagccttcagaaattctcttgtctttgcctcccacatcgccacaggagccctgggattacagatgcactctatataatgggcttttccctgggttctggggaatctgggagctcacattgttaggattgtgtggctagcactatactcactgagtcatctccccagccctcagtctgccctttgacccttatctgacagccatatgttggtaaggagccgcctttgtgatttcctaagactccacagtggggtaatcagcgttaagttccttcttcatgcctctgatttgtgtgattatggttcttcagatgaacaaacctcgcaatgaactctggaagtgacatctgcctgcacttctcttttctgcacatttcaatcatcctagattttttaaaaaaaggaacttctacatcctctgtgtcatatttggtatccctagcaagatggatcaggcttaaatatgatcatcatcaatatcttctctgctgtatgagagagatactttactgttattcttaggacttaattcttgataggtcaaacaggagtcataagaacacagcaaaatttacctagcatgtgttttctccccccctcaacctctccgcctgacttcctctccttcctctctcttttcctttttcctccctctttcagttcctcccttaaaaaaaaaagacttatttttctgtacctgagttgttttttgttttgttttggttttgtgttgttgttgtttgcttgaatgtatgtttgtgcacatttgcatgcctggtgtccacagaggccccaaaagagcttcagaactggagttacactacacatggttggaagtcaccacatgggtgctgggaattgaacctgtgtcctttgcaagatcagccagtgttcataagtagcccctgcccctggagacaagagtttcactatgcagcacagtctggcctcaaactcttgaagttctcctacactggcttcctaagtgttgggcttatagctgtgagccacagcatccaggcctttctataagtgctgggatcacaggtgtgaaccacagcacaccaggtctctctgtaagtgttgggattccaggtgtgaactacagcacaccaggcctttctttaaatgctaggattacatgtctgaactacagcacaccaggtctttctataaatgctgggattccaggtgtgaatcacagcataccaggtctttctataggtgctgggatcacaggtgtaaaccacagcacaccaggtctgtcttggaagtgctctgtggtcatgaactggtgcctcataaaaatgagagggcaaatagacaaacaagttaaagtaaggaacacaaaggttaaaattttataatataacctaattgttgcaaaaatgtaattttgtttatttttattaatacagtaggaacatctcaaatttcatttgagtagtgtagtgtatatatttgctatttgggtcaggcttgttctcagcattatggaaattctttaaataaatgtgaagcttctctgtttattttaaaatgcttccaagtttcaaattaatgctgtctcttatgaaaaggtgtaattccagacaagttgctttttatatttaaatttattttgcaaaaattatatattcgatcccgtgccaaaggcctgtgccatggagataacatgattgccaggcctgctcaaggccctgtgccctatctccactgttgccaaaggaaccgcacagccaagcttatctctcttctctctcctgtttctcatcacctcccttctcctctcctctcttttccttttttggaacaggaattttataggactgtgtccctttgctttggggtggtaatggttaaatattgcataatcacattttggaaaagaaccaggcttaaccgaattaaggaaatgttttcttcagcaaacaacattgacttacataatcaactgtctttgatattaaatctaccaaaattattgtgggtcttgtctttaagtatattgatatgctttatagttttataagacctatgtgatccttgcattattgagatgaacatcattacagtatattgttttgttttagcatgcatttgcctctctgttgtttcatttcggctttttctgtctgtactgcgtgaactaaatctgtatgctgtgtgtgtgtgtgtgtgtgtgtgtgtgtgtgtgtgtgtgtgtgtgtgtgtacatgtgcatgtgtgcgtgtagtgtttatatttgctatttctatcaggcttgttctcaccattatgggaattctttaaataaatgcaaagcttccctgtttatttttaaatgcttcaaagtttcaaattaatgctgtctcttaaagaaaggtgtaatttcagacaagttgcttttttatgtttaaatttattttgcaaaacttatatatttgatcctgtgccaaaggatgtgccatggagatagcatgattgccaggcctgctcaaggccctgtgccctatctccactgttgcaaaaggagccgcacagccaagcttatctcttttctctctcctgtctctcatcacctcccttcccctctcctcttttcctttctttgaagcaggatctcacttaacccaggatggccttgaacttgctcagtatgaggctgcctttgaattggtgacctgtctgcctccacctctcaggggtttacaggagcatgctccccaacatctgaacggttttacattttccagtcttttctgtttttacatttcctcctcctctacgagtacttattctgatgcccaatgtgtgaagttctcatctactcagagggctccagcatttcccatagggaatgttttgcatggttacatcatctctggtatgagtgccctgtttgaccttgggtgtcacttcttttttttgtttgtttgttttttgtctctgatttcttttattaattattctttttttgcagatttttttatttgaattagaaacaagattcttttacatgtcaatccaagtttcctctccctcccttcctcccctatcaccccccaactaaaaccctacctatcacatatcctttctgctccccagggagggtgaggccttccatagggtgtcatcagagtctttcgtattctttgggatagggcctagacccaaccctgtgtgtcttggctcagggagtatttctctatatggaatgggctcccaaagtccaaggtgtcacatcttatttactgctatttcccaattaaagagggagggcaggccttgtccacggttttagattttatggagatttctcatatttaaagttgcaggccaactaagacaaagggggaaatgctgcattttactgttctcataaatgaaaatgtatttttttttctggatcagaaatctaaaacaaaaagaaagaaaacaaagagtatggcctctggtcaatgagctctttctgaacacagataggtgtggctgatatttgggccaggggcccatcctgtttctagcagagttacctttatttggaaagagttgttgatggcatttttttttctggtttcccagctcagcattaatagtccacataaggtgttggggggaccccaggtggagttctcctcatcgtggggcaaatagactgatttagggggttgattcatgtgcctttctgtgcttgcttttacttgagccccactattgcactgagggctagcatcaaattttgctgagttcctttctatctactttccagactgcatacaaatctgtggcgacatgacttttcatggttccatctttatgcatttagcagactccttcctttctcagttgccaccaatgctgtaagaggttctttgcttctagcatcttacaggccatttcaatagaaaacttgcatggaataaaagggtagttaaatgcatcctcaagttgccatttttaactgagagccatctctgcttttaggaaatccgggcctgctaccaattcaacacccacgtgtactggtaatggctggcagagtatgtagttgggggcagacggtttatgctatattcttatttcatttctcatccatcacctacaagcagatgtcttctacatgaacaccaacttagtagccaagagtattttggaaaaggaaagccaagatatttcccataatcctttgtcttccaatattttcatacttagaagtagccagaacaatgaacccaatgctagcctgctgtcatttcaggtctgtgttccttccctcttgttgatgctgttggaggccttcggaacacagagcaatgtcttcattgtccctgctctgcccattctaagttatttcatgctagtgcgatgtaccttcaggtggatggatatccaacacattcctcccatataggatatctctcttataaaactgtccattcggctttccattgcatgcctcttaaactgaggggttttgtcaaatattccaacgttatgaaagtgacaccaacattttgtttaaaatatgtagagatgtataaataactcaagccttttatccttagattctgtttcccagacaattcctgtttcatcttctcactggatttcctcatacctcccaccatctaacaagtactgaattcagtaagtcaggagcaaaactttcagaagcttagatttgacagaagcctcagaagtgcagcaggaagaagaaagatgccgagacttcagtggttccttagagtcacagaggaggaaggataatacccggcaggaaagcctcttggctgatgtttaacacagctctaccaccaggaacaaacagaggaatatctaggtggtttaatggttcatgggtgtatgcctgattttactcaacaaaaatggctgggcttattttatttcttacacttgtgagcaaaatcaggaacctttaaaattcataggtgatggaataaatttgccaagagtgatagtatttgatattgatactaaaaaatagttattaaaattcagcaaaggtctgggatggaggtcagttggcagagtgcttgcaagcacaaagttctggggttaatccccacatgggtcaggcatgataatgagtgtttgtaattccagagcagagggtgtagaaggaaggactttgcccgatcctgtggttccaacaattgagtttgactttactccttagtaaatactgatgttttacttatttattttgatttttaaaattgattttttgattagcatgcaaaataatgcatttacttatatcccctgaaagacagggagccttggctatcctagaactcaattgtagactagtctggcctcaaaggcacagagatccacctgcctctgcccactgggtgctggggttaaaattgtgcaccaccactgctgagctatttttatacatatatatatcattatggtttgttcttattcctcctcaggccccactttgccctcttgtctttctcctaaatactcaccctctgcttttgtatatatattccattaacctcttgtcctcccctctttagacctcttcctttattcggacagttccctttcttatttttatatcccctccccacatatgtaagtacatattttaattggattccacgtgagagaaatcttgatatttccctgagtcagatttacatcctttaacacaatggtctctcattccatccattttcctgaaattgccattatctcgcttttctgtgtagttgaataaaaatccattgtgcacctgtacagcattttccttgccaacttattgtttgatgggtaaccagggtagttccacgtcttggctgttttgaatagtgcaacagttaacatggagtaagtatgtctgtggtgagctgacctaagattgtttggtaatatatacagttgtggtgtggcttcactgtatggtagtcctgattttagtttgtatacagaatctctgttgatttccacagtagctgaatcaattttggtcccaacagcactgtgtgacaggtctcctttcctagtatccttgccagcatttgttgtcatttgtttccttcacaacagccattcttcctagggtgaaatagaatctcaaagcagtttgaatttccatttcagggctagataaatgtgttaaactcctttcccctcatttttaaaattagttctttgaaaattttgtatgatgtacttgatcgtgttcacccctccaccaactcttcccagcactccctggttccctacccacccagctttgggtcctcagcttctgtatgcacatatgccaagagaggtgacatactggggaattgtttcaagcgtctactgttaaaaaaaatgacaagtgacttcaaagagaaaccaaaagcacagatgaacaaaataaggaaattgacaagacctggggaagagtcagcaacacgcagaagaaagtaaaaaggacgagaaaacatacttgtggatgaaaaagacagcaacatggaagtggaattcaccaaagaagttgagatactgaaacaaagaaattttgttcatgaaggccaaattccaacatggaggggaggtgggcatgacgtctcacctgaggggaggagctattggcacttgtggtttttgggacacggagagtttgttttctttaatgatgtgaccccgagtgagtttcccgtgcctctggggataggcccagaggattatacacacaacaaggattagactcagtgaacttttttttgtgcagttttggacaggtagccagagcggctgtgaatcgtgtgctgaagctaccttgtgtccagaagtctgcctttgtcagctctcttcatccccgttggtcagcaatgctccctgagccttaaatgggaggagggtagtagggatgactcatccacccagtcgcttaacttggcgttttgaccaggtgtgagtctccacattaactcttacccacagccaaaagaaacacctctgatcaaatctgagagcaacgcaaatctatggctagaaacacaactataaggcagtttgacagcatgcctgtttaccacaacagcaggctttctgctggggcctatgatctcctctaggtttgcagtaccaggctcaaaacccttcctctagagcaagcctcatattccctcagaaagtggtccataacctccataactgtcacgccactattgtacctggtactttaggcagagttctctagaggaacagagtcattagaaaatcatatagtagaagaaaggattcgctagactggctagcctgagaggaactaagtagttagacatagacaatggctgcctacatgctagacaatctgaaaacctggcaactgttcacttcttgaagccagatgcctcagtagtcccaatctcctagaagattcccaaagagtcacaaatcttcaatacacattggaggcagaagaagttggagtctcatatgagctgaagaaggtggccatagcagcagtaatgacgaatattagccacattcactaataggaaagaaagggtgtgtgtgtggctgtttgaataggaatggccccataagcttatatatttgaatgcttgctcatcagggaaggagtggcactatttgagaggaaataggttggaaggaaatgaaatgctagaggagctttgctctagttccttgagaactggcaacttccaagtataggtggggatggtggccagttgaacttgtgttttcttgtctttcctatgatttaccctggtgctgagtctgtattggacaagtgtcttacatctgccaaagctggccccacttcgatagcttcttttctctgtatacagaggggttttataggcagggcaaattctccaacgatcttgggactttctagttcatatcccctggagtgtttaaagttttagctcaggtatgtctcccagtgcactgggatccttacaggcagacctctatttgtagtttcaaaacacattgatcattaatcactgcggcgtccacccttgaccagcaagaaagacgccacaccgaggaatcttcttcaaacacagtttaatcgggaacctctttgcttttacaatgtataatggcggcggcggccccgggccgagggagacggggcctgatatagtctacatctaccaatcacctaaccctacgtggcgcgccaggataggttgtctccaagcagaattaagaggatacatgacctttacctaatttggagttgtttaccacagagagcgctcgccgttgggctggcggagggcggaaaccggcgccatcttttgggtgcggttttctgcagctccctacaaatcaccctgctgggatgatgcacttacgtttgtctgtcaagtgtttgaaaagaacaccagaattcttaggctgtaaagtggtaaagctcctggcagatagctggctctagaggagaggttgatccacccattgaccccaggcttgaggctatcaaactttagcgttactctctattgatgatatctgcttctatgcaacaaggatgagacgatctttcttatgttctctaccttggctgagtctcctgctgtctgcacatcttagattatgaatctggccctcccccttcatcattgtcttccagaactctctctcacccagaggcagtagcaggttcaagtcaggctccctggcttgtacctgttttctattctcaggtcctttcggtaattctgttttgtacaatgggcatgttctcaagacagcaccgagccacagccctctaggtcagagaataaaaagtgggattcctctgtactgttgacccattcacgggagaattcactctctccaaaacctttgactgaatctgagggaactggtggcttgtcctgtgtgtagttgtgttagcctcttttcacccgggacttctagatttacttttagatgagatgcctgctgcctctcccctgtcagggatctgtgcatctgttctgttcagatcagcttgcttctttttcaccatgtctctggtttgtttctctggatttctcagctgtcccatccctccttttctgaaagtttactatttcttcttgctcactgggctgtatttcaatacggatgttcaatctagaacataatgactgttttccattttgaattaatcatctaattagtgctgggggttgaactcagaatctgtcacatatgagatcagtgtcctatcaattaattacattcctatccttcaatttttgctattattatatgttacaggacagcttctaatccaccatcatgcttggaagttccaaatgttgatgttttaaaacttttaacaaattataaacatataaaagaatactctgtaataaagattatttattaataattcaactttaaaatgaaaaatatatagtcaagctcttctcatctgcatgccctcaactaatctcctcattgagattatgttgaagcaagtccaggaaattagataatttagttaactaattatgttggaggattgacccttgaacctgtgatacactggacaagtgcttcacctttgaatcacacccccagtctttggtattattatcaatatttgttagatatagagtatcgatatgtagctcaggctgaccctcacaataatcctgcctctgactcctgagtatatgccactatgttcagttaaggtctttctttttcgatggacccgtaatggcaaacattatcacacgtaagccaaagtataattcattaatactatcatacaaatgcttactttgatctgtttgctttgtgaaaattttaaacaaagtttgaagtccaaataatatctgtagtttgccattggaccagagctcaacatttaccagtcatcatatttcaaattatatgaaatttcctggtaaccagttaacttattttaagtatgattaaaaatatgattttaaaatgaactttaaagagttcaatccactgaaggtgtgccgccactggagctcagttccctatgtcagccaagtgtagctcatgtgtgttggctcctgagcacattgaacacagtgctgatggtctttaattgcttttcccattctttagtagcagatgttccagtatgtctttcacactctttgccagaatcaattatttttccagatatctttaagaagaaagtgtttaagtgttaaaatatggacactggaggaactcgccagttctggactggctgttgattctttgtcttttcagtggttacagttaggcaaagttgtgttatggtttggatcttaaatgtctcccaaagtctttattttaaaggcttattccctaaattatgatgctctttggaggtagttaggcttgtggcaagtgtggcccagtggaagaaagctatgtcactgagggcacgcctttgaaggggtattgggagttcaatctactcctctccctttgcttcccagtcactctaggatgaaaaacatcctctatcacatgctctccatcatggtactgccttgccacagacccccaaacaattgcctaagcaaccatgagctgaactacgagcccagattaaaatttcttctcagtaagttgtttaagtattttgttgcagcatcagaaagctgaaggaaatgggaaagtgggatcgttgtgaccctagctgataatgtggtgcagagtggcaggattttgttaaaaaatgtggaggagtagattagaaaagccctagcatgtggtaaatggagaacactggggaattctggtggcaacttaggagagcaggttgctgataggaatggggactgtaagcaatgttcttgaagattcaggaatgagaattctgctgacaactggatgagaggtcatttatgttacattctggctaatggttgtgagtcttttgtgggaggctgagtttaacagtggtcgtaggattatgtatttcaggcagtggcatgggcattgctagctattttaatcagatttatagagagactgaggattgaaaaggaaagtaaaaactagtatttgtgcatgaaaggaatatgtttaaactttagccaggagactatgactgttaaagagattggagctataaaaaaaaaaaatcaaagtactttgtactgggaccaaagtaaagatgcccagagaacatcttaataatcttaagccctacttaatacttaatagtataagagtctaaactgttttagactttgtttttaaaaagccacagtgtgccctgacctcaaaaaactgcctagcatacaatagactctgatgacaccctatggaaggcctcaccatccagggggagcagaaaggatatgtgataggtagagttttagttttggggggatgatatgggaggaggggaggaagagggaactgggattgtcatataaaacaatcttgtttctaattcaaataaaaaaaatctgcaaaaaacaaacaaacaaaccaaaccaaaccactgcttagtaactgtttccctaggatctagattcattctgtattgctgaccaagcactcagaggctgctacagacatggctcatgtagctggctcctgctcccactggtggaagatcctgacgttttgtatatgaatgaatcatttccccccaccgtctatccatccatccacccatccatccatccatccatccatccatccatccatctatccatccatcttctatccatcttcttcagtaccaggaatggaacctatggacttgctcttactaggcaagcactctacagcactctatgactaagtcatattcccagtcttttcttcttttaagacaaagtcttgccaagttagttaggctggtcttaaagtcagtctgtagcccagaaggaccttgcactcttctcgcttcagcttcccaagtagccatgatcacaggcttgtaccatcagacttgttattgccactgtttatagaaataatgactgactgcaagagttgtggacacatccaacaagatttcaagtgatagtgtggaaggccacataagcacggaaggctacaaagcatgcaacaacatgatgttcttgtaggcatcacccagaaggcaatacatgaagctgtaagagaagcattagctaagacacgtagagaaagtccaagaagaatagtggactaatgacacagagtgatcaactaaggaaaagcaaaacagaattaaacagtgatgtaagcatgctatgtctgaatttcgttgaaaaggcaatgtaagatatatctagagtatattatcccaaagccaagaaacaaaattgagtacctaccaccctgtctctgacaaggaatttaacacacaatggccaagtaaaaaggctgacttgactcaaactattagagcaactctgggggaaatgtgacttaggctttaatgaatgtgaggaattggaatttttgagagataagaaatccaagaatacttattaattaatgtccatcaggatgattccaatgttgaactatgattgaaagccactaccgcataatgagaatataagaagaatttatctcagtgcatataaaagaaagtcgcaggcctcctgttctccagcatgctggtcaacattcccaaactcctttgcttgcctttttggctaacgtaaaaaaacaaaacaaaacagtggttctgaatcatggccttgggtcttctgcgccaaatgaatcctctctttatctgagtctcttaagaccacattcataaatcagagttgagagctaggagataactgacaccctggctgtgtagcttgccttctgtttgagaatgtttctgggttctccatgtttggcagtctttccagcacatcctaaattaaataaaagagttgcttctcctagcagagcattggaatgaatccagctaagaattgatccagcaacaaacaacttaatttgtgttggtataaaaagccctagcctccgagtgtctgtaattaggaagacgccagcagagactgaggtgtgctagatgtgtgttcctccttccctctttgcccactgcacacccacccacctgttcttttcatagactgtcacagccagaatactcagtaagaaagtatttggtctatcacgtgggcttttaggcttcttgagtgaataactaccagaaactgtgataatgttaatggatgaagatgctttcaacagtctctgcaaggttagtgaaacttaagaagaattctttattcacaataactcataaacttccacattttaaacccacaaatgacaaacccccacctactaatgattgaaacaacctagacattgatttctcagaaagacagtctaggggcgagcaatggaggctggcatgatgaagacactgttattctaatggccttgccatggtcaaaatgtgagtgttctctcatgattcctgtagacaccaaggtccatagtctggccagcaggaagactaggggaaagaaaggcaactcttcccttttcaaaattagcgattagtcagaaatatgccatcttagagccttcagccagtagctgatggaagcagaagcagacacccacggctaaacactgagccgaactcttggaatccagttgtagagagggaggtgtgatgagcaagaggtcaagatcagattggagaaacccacagaaaacagctgacctgaacaagtatgaactcatggactccagactgaaagctgggaaaccagcataggattgaactaggcctcctgaacctgggtgtcagataggaggcctgggcagtctatggggcctctggtagtggaacagtatttatccctagtatacaaatggactttgggagcccattcctcatagaggcatactctctcagcctagacacacaggagagggcctatgccctcccccaattggtgtgacagactttgatgatccccatggaaggcctcatcttccctggggagcagaagagggatgagatgagggggttggtggggtacaggggaggatgggagggagagggaactgggattgatatataaaataagattgtttctaatttgaataaaaaataagtcatacttgattgtcatgatagtttttattacaagaaaccacaggattagctgaaatctgtgatctcttaaaaggtttactagaggctagttaatgccctgggggatcactgtttttgctactgtttttaactttcttattttttattcctgtgtctttaacatcatgcatctccatcctattcatctcgatgtccctttgtatctgctctttgcccttgcaacccctcccccaataaaattaaataaaatttaagagaaaaaagaaaacaatgaaaaggaaaaattaatcttgtcatggaagctgtagtgtgacacagtgagtcacgaagtaaaccctttatccactttacttgcaagtgttcattgcaagcagtcattggtttggttagaggcctctgttttctcttacactactgatgctgggccctcactgggactctttttggatgtcctgttgtagccctgtgtcatggagatcctgaagctttgggtctgcagggctgctcccttcatgtgctccagcagatcacagatgggatggaccaactcataaccctggttctgggcctgggtagttgcaggcttggtcagcctgccagctctcccccttcctcaccaccagggtggactctcctgcattgctctagctagttcaacccttgcagagatgaacaaggggtgggccatctctactgtattgcttaggaatggtgtaggagccactctcccagggacacctgttttgaacccacttctttgtaatctatcattgttacatgtttgtggtttttgttgctgtcgttgttttggggttagcctttaagaggtatcctctatgaattctatattatctgcatgtgcacacacatttctgttcttgatgattagaatattacaaaacacactccattatttattgcttgtttttttttctgcatgaaatgtattcaggagatcattccagaactgtcagtacaggtttgtcatatttttcaacagattcagtttttcagtttcccactagattttcataactaaagtcctattagctaaatttagttatgccctggggttttgtgttataaatccagtacaatagctaccattctaagtctgcacatgtgtaaacaaacacataggatatttttctagaggagatttctagatctaaactttggtaatgattatcaaattgctcccaaagtgccccacattatacttcctctaccttatatggtatgatgatgtctgtttgctaacattttcatcttccagtgtgctacaaataaccacatattttgcttttctggtaggtgaaacattccctactttatacacaatcatcttctcactctccgtgaagctcctcgtgttctctgtggattctgttagtgttcactatctttccaatgaaatgcacagttgcttactaatttgttgtctttgta
